United States Patent Application Publication US 2024/0110199 A1 - sequence listing, part 2

SEQ ID NO: 1 - DNA, 7202153 bp, Glycine tomentella (residues 1,800,540-3,601,078 of 7,202,153)
atctcctaatcagaatcctaaaaatcaaaaacaacggattaggacgctaggccgttggagccttagcgaaacctacgtacgaaaataggtcacctcctaatcggaatcctaaaagtcaaacgacggattgggatgctcggccattggagccttagagtaccgattaacaggagacgataatttgggtcctaaaagcccaggaggcggattaggaccctcggccgttaaatcgactaagcgaaggcgacgtatcatgcaacaaggccattggagccacacaaaaagtcaaactagcacatacgttaagaagaatatgttaaagaagaattaaacatgttcaaattgtcggaaatttacaaagaaaatcggcataccggcccttcagtcatccttctcggtcggaggagcgtcatcggtaggaatatcgccaccaggggcgccaccaataggagcatcaccaccgtcgggagcaccaccatcatgggcctcgtcggaaacgccctcatccccatcgctatcagaaagcataaggagtcggccatcactgacgtaggcctgatggtgcataccttcagtgttcaacttcaccccgggattcaagaagtacagctggctcaaagtattgtaaaaagaagattcggaggccctctccagctcgccgtgaacgaaggaaagctcctttgaagcctcctcgtaatcctgagttttcttggcgttgagatcaagcagctcgtcgcggctagacttacacacggcataactcttccgaagcttcttcagtgattcctccgaacggctggcggcggccttggcagtctcggcttctcgctccaaagctttaactttggtccggtggacgtccagctcagccgtcaacttggccgctgtctcccgagcggcctcggagtcggtcgtcagtttagcaaccaactccttagactcccggagctctgcagtcaatcgggtagccaatgcagtggcttcccaagcctcgaccctgacagccctcaaggtctcggccgattcggcgacctcagcatgagccgattccaactcacgtcggagtgtctcggcctcggcctcagaagcttcggcccgggatgccaacttggaagccttgaggttgagagaagtcagactcccaagcaacgacccagtcttgaaacaggccaactgcagattatttagctcctccagctcaggatcggagaaagcaacaacgtcggaatacctctttggcgcccgaagaacctcaaaaaggttttgggtcatgccctggttccaaagagcccggggaggaagatgaacatgaccatccgacgactcggccgcagcagaaacaagagcagccgacgaggaacccggaccagaagcctcagcatggtcgacgacgggcggagacggagtaacctcctgggtggtctcggccgcagcagatggaaggccagcggcagtcagagcctcagaagtctccaccgggctatcagggacctcaatggtagtgggcggtggagaagtggggcgatttgaaaccacgacagagactgggtccacagaagactgggtcggcccagttgcgacggtagtcggagtagggtcagaggctgcgtctttatttcgggtatcggccaagcgacgcttcttgtgagatttcagagccgctaagtggcggggaagaacgtcagagcccatgtcggtagctgcaagatgaacatccatcagaagaaataagaaaaagagaagacaacagttgatagaatcatacaactaacccttctgaatataagaggatatcggtgctagattcccagaactcttgcacgataatatttgagccaccgaaacaagttctgactccgacaaccgggcttggtcggtccgataagaagaaggcggagactcatagtgaagaaaagaccaagacaaagggaacttgggtgcaagagaatcagccaaaaagaagggacgttggccggaattggcgacaactaagaagaatttatccttgaagcgtttgaaagaatcggaaaataaagaaaacaaccgacggtcagagccggtgtcatttcgaccacggaaggaaatccatcctttccggtcagcggcatcctttcccgaacggctggcctggacggagaagaaatagaaaaacaagggacaggtacaggagacgctgagctgctggcaaagtgtttcgaaggcaaggataaaagcccagctgttgggatgaagttgggtaggggagacatgcaagtaacctaagacttgcatttggaaatcggacaaagggaagcgaatccctactctagtaatcacctcactataaaacgaaaagaaggggggttcattatctttttgggcgacacaaacagggacgcctgacccagctgggcgaacatgaaactcttcagaaacttcaataggcaagcgggcaagatcatcggaagatagcaccgacgagtactccagaacctcgtgggcgacccaaggaaactcatcggacaaagccgaaagagcagaacgagacccagttgtcgagtcactagcaccaccaacgtgagaacccatgaatacctaagaaaagaaagagaaagcagttagaaagatacctggggagcgtgccgacaagggcggagagaggggcaaagcttgaaccgatacggacaccgatgggcggacacctgaggccagggccggcccctttatagatttgggcaccctaacgggattgtgccggcacctgtccaaaaggtcctcggcttgtttatccaagtccttgctggtcaagtagagaaattcatccagacacttggagcaaggctcatagcggatttcgaattggggcggcacccctagagcgggcctaggcctaacaggggcagaagcaggaagcctaggggccacccccacccttggcacgggttgcacaaagctagggcgtaggagagaccctgaaaaccctcgaggaaattgcctagagatacctacaatgggaggcctaggggctagaggaactaaaatcctaggggtattaggggcaccaaaaccagaaggcacccgaagaaaagacctctccttctccgcgtcaggaagggggagcccaaatagccagaaggcgacgcggggaggatacagccggcgaatctccgcctcctcctctggagtatacttcatgacggaaacaaaagagggggggggaatggcttttgcaggagacaagactaaaagacaaaaaaggagcaaaatagcaccaccagtttggagaatgggggaagaacggagaagaagccaacaaggggcaagggaaaagcaaagcagaagaaagagcagggaggaaaagttacctggaaagtaaaatggtgaggtaggaagcacaagcgaccacggagaggaagaatgcaggcgctcaaggaaaacctacggagaaggaagctgagagagttggtaagcagcaagtaaggatgagaagaccaataggatgagtgaagtagggcatacgaaaagaaagaaaaccgtcgaaattcaaattgggggcaataactgacacattgaagaacgtgggagcggcggttacgtcataactgcacccgagtgatgattaaagcacagaacaatgggggacgcgtggcgcctcgggattgaaggacgtttcgttgccctaaatctattagttctggaagggcgaaactggcccaatacccacaaataggacagccgaagaaagaaacgcgactgccaatgacggcccaaaggtactcgggccaggaccgacgcatggaaaactccgacggggcatcggactcaatccgccagccagccaatggccaccaagatgtcggtcatctctacgaacggccggaaaggtcaaaccggccaaggacaaacagaaaggccgataatgtcagttacacgtcctggccccccagagtcctggggaaacaggacgaggggcatctattacggatatggacgtcccacacccgtatccgtccaattaatgaatcccgccagtcacggattcccccgttaatgatgaacgagcaattgccggccaatatccccaagtcttcggctcaggtatgatggaggaggattctgcggctgccatcccggaggcggaaagccctgctccaggcccagacgaaggcatataaggaaaagacacccaacggtgaaaggtacacactgattattcggacccttctccttcatttcacaccgcacacacagcaccccaattgcctccgtgtcggtgtgatctcgtcctcagtcgttggtctcaccaccatagaccaactgggaggagtcaggtcctacaacaacaccaccggcgacatcgccggacatccctattatcacataacagaacagtaatattgatacaggttttgactttcaagttttaattctagttaatttgattctgaaatcatagaattggtttaaacttatctctaaccaaattgtaacttttttcttgagattttcaagaattactcatatgattcatttgaaattctatacaatcttataagtcttatataagaaatataggttaagtaaatacaaaatttgaaaataagtaaaaattattaattaaattcaattatttgtttaagatcaaaactaaattaaagtgaaaaaataagaattcaagataaatcaaataaactaagaataataaaaaaatattaaattaaaatcttcaatcaaccatcacaaaatgaaatgtacgttgcagccggattaaccaatgtatatttaatatactcactacgacagacggggaaaacgacgacgattctacagcccaaacgacgacggttctcgaaccgtctttgttgcgggtgtcgttgtaagttggcactttcgacgacggttccaaaaatcgtctttgtaaatttttaaattttatttatttattttttttacatagatacaaagacggttctagcaagaaccgtctttgtatgtgcactttcaaagacgatttttacgaaaaccatctttgtttccatttaattgaattttttttaatttacattaaccgaaaagaagacggttttcccaaaatcgtcttcataggccaccattcaaagacggttttgaagaaaaccgtctttgtttccatttatttgaatttttttataaatttaaattaaatgaaaagaagacgattttcccaaaaccgtctccgtaggccaccattcaaagacggttttgaagaaaatcgtctttgtttccatttatttgaatttttttataaatttaaattaaatgaaaagaagacggttttcccaaaaccgtcttcgtaggccatcattcaaagacgatttttacggaaaccgtctttgtttctctttatttgattttttttaaatttaaattaaatgaaaagaagacggttttcccaaaaaaccgtcttcgtaggccaacattcaaagacggttttgaagaaaaccgtctttgtttctctttatttgattttttttttaaattaaattaaatgaaaagaagacggttttcccaaaaccgtctttgtttccctattttgttttttttttaatttctacggaaattgaaatttatttgtattattactaccaaataaatttaagaaatacaccacattgtctaaatttcattctataacaaataaataaataaaaaaacaaattgaatagcctggaaacaataatcaacataaacaaagactaatgaaatcatatattacaaaaatgaatttacaaaaagtacaaattgtataaatatgcgtgaaatattatcaaattacaaagtatcttttttccacccatccaagtccttcaaaatcaaattatagacgaatatatttctctccaattgatttcactatctggcaagctgactcctacagccatgcaaaaaataagcatcatctcaacaggtgtagcagaaaaccagaattttttttttcagattaatcacaaagaaggtgaaaggaattgaaaatgttgctagtacctcttctacaaagtgaacatcaaaccaaaatgcaaaaccatgtagcggtgctggaaaaacagaaaatatgcatctataaacaccaagatatacaagcatcgttagtgcaaaagaactatccagtaaatttgtagagagaaactaaaaaaaaactaaaattaaaggaaggatttagagttgtgtcgtgaacaaaagagatttgacacctctaagggatttaatttgaggagtaaagtgaagagttataactcatcactaattttcacatgacactcacaagcaaattacaatgtatgtttattgtataagctagtaactgtgtatagtgcatcatttgacagttgaaaagtgaagtaaaaaatcaacgaatgaaagtaacattagtggactcaccacttgttgctttgcaaaaagattttcaagagtaatccacacaaggtttcaggaatgcctactttattgctaatggtttaaatgcagacactgccacaaaactcagtatcaaggcatgctaagttatcctatggtatcaatactgttcaactgtatcatttcatgagaaacaggtttaaataataataataaatctaatatgctatctgaaaatgtttcgtggtcatgtcacttgaaacatgaaactttaaaaaagaaatgcgaaagcagtagacaaactgttaatctataagaaacaaatgaaatgttgcaggacaaataacataatgtagtattgattagcagattatattatatttataatcattatgaagagtcattaacatagacaataaataagcagatcatagaatgcacgttgtatgtctatatgaagtacaatataaatatggacctcaagaaaactagctacaaagtagtgcactcactatgaattccataaatattgttccagcagtcaatgctttccttgtatctttgggtagttgtaaaaggagccatgtacaactacaaaataatacaaagaggtaagtcttctctattacaacatatatattgaatttcagtaaaaactgattacttcccaaacacatccaagccaaggcttcttattaatccaattaacggaattaactcaaactagaagtaagaggagattaaactttggcaagccattagtctgaaaaacaacctcaaagggaatttcactacaaactattaaagatagaaaataaatgtaccgttgtctagtaaaagaagcattagacctccaggattgagccaacgatctctagcagtaataacacttgcatgcatagattaattttacgtgaatgaaaggcacaatttgggtgggagaacgcatgctgaatgggagggaaaaaacctaggcagaacttattagctttaataaaaaaataatattataagtatacatgaaataaaagtgattgactcaaattggagcgataaaagatttctatggaagcgtgctgaataagaatatgagattaatattggaatcatccgcaataggaagtgtacgttgtagctggattagccaatatatatttaatatactttaattatacaacatgacatttcattaactattatccttgtggatgtatagattcattttacttgaatgaaagtcacaatttgagcgagagaatgcatgcaaaatgggaagaaataaatatgggtagaacttattagccttaataataaaagttataagtatgtgcccatgtaacacaattcatagatgaaataagtgactttcttacttaagtataagacacactggtctattaatatggaatttgcatgaagaagagacatgcattaaatactccaacggacacaagacttcaatcaaaaaacagagtgaagaatccaactgttgtgagacaacgaatacttagagacagagacagacctacgttgaagattggggggtagtgcccccccttaaattttcaaggtaaattacctataagttgttctctgccatgacaacatgctattgttccaaggatatgactcccctttcccattgttgtagttcaatagccaattggacttctccgagacccctacagacacgtcacgtgaaaccgtcgtctaccatgttgaccatggcactatgtcggggcttagttccaattcattgggtgttactgttaacaatgttgttggcaatgatgatgacacatgatgctgatctccatcatgtccatttgaatgcgcccaactgtaaccattgaaggccaccaaggacacaggcaccaacaacccacaaaagatcacaaccacctccttccattttggggttttctcttttcgatctgtatggttctggggtttgtgagattactgtttgtctgtttcatttttcattaaattatagtttataattatttgttcctttaaattttctttataaaaataaatttcagggacgctacccccgaactcccgccactaagtgtgcagacgccactggtgcccccccttgattatttttctagatccgccactacttggagatgaaaactatgtatagaagaagctttgaagaaacaagatacatatcatctacgtgaattattctttcattctttcttgtaaaactttatgtaaatccttgcaaagataccaaaatctcaaaacattttgtataccttgagagaaaagactaaaaaggctaagtgatatatctatcggtaagattatcacatatttagtcaatgtacaatcttctaacaaatcttgttgatttgtttagagctagcagtggttgataggagaaataatactgagtttaagtcaagcttggggtagaacttgcaagtgcaagagtcagaagtgacagtgaataattcttgtaagtttgataagttagtggaaacttggtaattaccaagaactgaacgtagtatcgggtttgagaagaaccaatataatcctttgtgtgctttcttgttgctagaactgacaaagggttttgatttcgtttttaaatcttacatctcatgtcgtttgacaaataaaattctttttctcatcgactgaatcaaaacatttataagtggttttaggtttatctgcatcagacgataaacatgtttttagtctgtagaaaagttttaaattttcaatctcccttcttgttttattttcttctactacctataccaacaagatgcatctacttttttgtagcctcacttaaaaactctagttaaatgtgattgacttggagtaatagtgggatgagtgaccttttgagaagttttccagaaagtgtgtgagtgaagacaaagcatgtaagaaagtctcgtgctggtttgtgagaacaatcattaatcctggaagtaggagaaacagattgtcgaggtcatggaaatggctatctacgaagagttctggccagtggaaggttatggccaacaaggatattgagtgaagtgtgactgtgtgaagtgtcgtagtgtgagctgctaagaagtcaacaatcagtgatgttacacacaaaactttagacgaagaaccagagtgaagaattcatctattaagaagacaacaaatacttgaagatgaagactataaatcgaagaagctttgaagaaacaagatacaaatcaacttgcgcaaaaacattctttcgttctttcatgtaaagcttttatgtaaatctttgtataaatagtaagttcttaaaacaccttgtataccttgagagaaaagactaaaagaattgggtgatatatttgtatgtaagacgattatatcttattcattgtgtaaacttccaacaaatcttgttgatttgttttgaaccagcagtacttggtaggaaaaaaatatcaggttgaagtaaagcttggggtagaagttgtctttgtaagagacagaagtgacaatgaataataattataacttttgttaaagtcagtggaaatttggtggattgccaagaactaaatgtagtttcaataattgagatgcactgatatgattttctatgtgatatttttattgcttttctttgtgattattcgaccaagggtatgaatttatttttacatcttatatttgtttttgattaagaaaattgtttcctcatcatctaacaaagctctttctaacatattttatttgtttcctttgaaactattatcaaatgataaacatacattttgctaaagaaaaagttctcaaatttctaaaacacaattcaacccaccttcttgtggttttgtttattttcttattatcttatcctcaaaatttatggtggttttttcctccaaaaattgtcttttaaaatataaattaaaaaaaatgcgttcgaacctatctctgggccaaaaaaatctcacattgtatatttgcgagaatgaaaaatagacaaaaattttgtagggacaaaaaatatattttaaccataaaaatattatctataaatgttctaattaagttaaaattatataattatcataatttaaaataatcttaattacattaattaatatatatactttttttatcataatttaattattttaaatcagaatatatacttattctaattaccttaattacttatataattttatgaattaaaaagtaaataaaaatctccctacatttttttccactcaattgcataagattttttcctagcttacttctctatttttaggctttaatacaactttgattccttattttgctcaattcatatttttgatcctttcattttaaaatagagatgcttggtctttctattttaaaaaatatgctttgtatttcaaaatagtgacttttgaatcttttattttaaaaaatacacaattttgatcctatatttttaaaaattataattttaatccaatcttcaattttttctatgttttatttttttttatttcttacattataattaattaaatattttttatgatatcttaaatgaataacttaggtcttcaactagattaaaataaaagacataaaacatatacaaaattgaaaatatgactaaaattatatatttttataaaataggagaaccaaatatctttattttaaaattaagagacaaagattacagataaagcaaaataaaaagacaaaaaatacatttaaacattatttttatttattacaaaaatattttatttgcaacacattttttaaggagtaaaactccattttagtctccaattttgcaagaaactctcgtaatagcatatgaagatagaaatatgctaaataaattcttaaaattaaaattaatgtcattttaatccttaaaaatatacaacttatcattcatttgagggcattatgggtgggcgaccgccagagcttcataaatatgagggtcaccaattttttttatctaaatattaaaataaacatttatataattttaaaattatataaaaattattataaaaataaaatagttttcaataagaataccaataatttaaatacaatgttgaacgtagaaaagaaaagtatatcatatattttcttccattgctattagcattaacataattaagcaaacaaagttcttgaagaaaaaattataatggttatgattcaatcttcaataatgaattaaaatcaaactttctgatattgacttattttggaatatttaattgcttttatggtgcatgtgtaacttataaaataatattaaatattgttgttattattgcatacattaaaagaaaataatttatccaatttaaaattggtaaaattctattgaatattatttttaaaaatcttgattgtaaataaattattacagattttgccaaaagtaaaatacaaaaggataaagttcaaatgactaggagggtataattttctcatatcgcctaggcaacaaaaaagtcaaaaggccgatcttgcaacttattattattataattcctaaattttataacttactattatcataatcataatttctaataaagctaattatagagactaaaataactatcaaatttcattttctgatatttgtttgatattcttctaaagtctaataattatcataaaattaaccagtttatttaaacatttattaaaataagtatttattttaataaaaataagtaatttcttatatttaatgtgtttatttatattattttgacttcatttttttattttaagaaataaatcttatctatcttttacataattatttatataaaagtatttattttaaaattattttttaaagtttaaacacacttatccgttgtctcacaaattcaaagatttttttttgttgaaaatttactctttttctaagtgaattcaccgtgtcagtgcaagttaaaaaacacgttttacttcagttcctccgctgctcttgcgtttggaagaacaaaacagtgttcaactctctcacacttatctcctcctacgttgcaatccctctcatttcatggctcgcaagcccttcaaattcaatggtaacccaacaactctgaattgcatcacactttttcttcttcttcttatataattctatcttgctttccgtgattccgtcactgtcactgtctcaccaaacagagagcacacgcaaatttcgaactcgcttttcactgttgttcaatttgtttttgtgaccatcatcagaggatgttctcgagcaactgagaaatgggactgcgaaattcgaggttgtttcttacccggttccttcagttgctgctcctcctaaccggaacacgagcttgtttgggattgggaatagtagcactgtcttattcgctagaattggctcatccttgtgagtttttcgtttcacttttggtttgtctctttcttgtgcgtctgtgatgtgttctttttattttttttttctaggctgaaatgtattcttaatatatttacgtggcattcattttcaattcagtccttataaaaaaaataaaaatcttaatttgttcctatacttgctatcatttttaatttaataatctctctggctattgttgttgtagtatattagttaatggaatgtaggggtcaagatgtgtatttcagtaaacagttttttttaatgaaatcaactggcaagagattgtactagtggtctcaagttcgagacctgaaatatacagctatgttaaatatttggagggagagagatttttgttgcccatagtaattttaatcagctcgaacaagattgattcctatggaggatactctttgtctctgccaaaattaatcttttttaataagagcttatatcttaaacttgatggtaaagcatactggaataggctaataaaagcttattttgataagcttaactgtcaagtttatggaaatgagctaaaaagaagcttatggaaaggtcataaaccactttcttaagccaaataagatttgcacaagtcctttcaatctcctcctaatttacaaatgaatgtcgtaaataactatcagaaggactataatttttagtcctgtgacggttcctatggttcacaataattccgttagtcttatggtgtttataagggcaacaacatatggtgaaactgacattgaagataattatacatattggaaccaaattgaaaaggagtatcatgcatatggataaaaaatatattttagtctgttattattgttgttgttgttattgggaacaaaaatgggtttatctatttgcctcaaagccttagtcaatggtcactactcactagaaattttgtattttaaaatttcatatatatccttataagtggctttcagaataaaagatttggttgataaggttgaatgctctagaaaagtggatcatatttgatcccttttctcaatgctttagaattttgatgagtttccctctcactatgtcttctcagtggtggacactctccagcaatgaagaaacttgagcgtttttcagttcagaaggttacaggggatgggcggtgtctgtttcgtgcactggtatcatctttgttaccttttgtttcaatcacttttgtggtttcttgttagtggaattcaatatgatgtctttcttgccatcaggacaaaaaagattaaaagaattacgagaaaggagtcctaaatcaaagtgatttataatttggatagcatactattcatattaagtttgaggttgttggtgaaggactccttttgttgagagttaaaacttccaaactggtactaatccttgtgctcaagcgctgatattttactctagtgcagtaataatttctatgtcatcagtgtagtctgtgtaatgtagtgcaaatgatataattagctttgagatcaagacgattctttggatggcactgctcttcaataattggtgtagaaaagttggatgggggaataatcaataagcctggatagtgtttgcaagataataactcatgattagttttcttttatggaataggccttttttaaaaataaaataaaattgtatgagttgtgatggcacattcttttggccatataaatttgttaaatataaattgccaagttccttcattagtttgagcttccgccatgcaattcttttgtattaattttagtggtaagtggtaacatttggttcaatggcattaggtcaaaggaatggcttacaataagggaaccactctcaatcagcgcgaggagagagaaaatgcaggtgtgctgatataccactggcaatacacatgctgatacccttttgtttgttttgctttctattacagaattttattttatgacacagcttgggtatgatattattagctgcttctgctattaactgagcttcttgtctgcctaccatgtttattcctttttcatgccttataaccttcttttcctttctcgttgtttttcttttcttgtcaatgttttgccttgcccatgatagcacagatgaattaagaatggctgtgaaagaagcaatatgtgaaaatgaaggtgaacgtaaattatacgaagaagccctcattgccatcacagttgatgagcctataaaacggtatgttttggaagcgttaacagaaaatgaagattttgaagtatattgttagtttgtatgaaatgtcatgattttttttttttttaatttgatcagcaaaaataggatatatgtatatatatatatatatatatatatatatatatatatatatatagaaaacagtacaagaagtactgatgaatatacaaaactgaatcaacactgagaaatgtcatgattaaatgtgttattttgcagttactgccagcggattgtgcgacctgatttctggggaggagaatcagagctactggttagtgcttcttatgtttacttcctaaatcttgcaagctttactttgttatatctttttatcttttagagtaaattagtattttagcttatgcattgcacatgctaaatgttttttttaatataattaaaattgatgctaaataaatatttttgaatatataaattatattataattaaaattcataaaaataaataaatatctttgaatatataaattttattttggatttacaatgaacaatataaattgtgatataaggttattttgctattgataaattcttaaaaaaaaaaaaaactattgaaaatcaatttagagttagagataaaagagggtaagttgaaagggataggtggttaagaagatcaagtgtacatataagagggtagtttgagatgattgatatacatttttaggctagttgggggtagagtgtgaaatgcatatccaaagaagagaaaagagagaacattgagaatgtctaattagagagtggagagtgaaagcctcattcttatgtattcaaatttatgatataagagtagattatttcaacatcacttctatttttcgcttcttactcaaaatctgctttgttttcaagacctacacaaaacccctcatttttaaaaaatgtgttataattaaatccaatttttgatgatgtacttaactggactgttagtcaaaagtcaacagttattttatgtcaaattgacaaaatcaaccttatttcaagttttaactcatcacacaaaacccccttataaataaattcacttcaatctaaatgctattcatacattgacacaataaataagtacaagaatagtatttgctacaaagttcatgacatgtgattgtgtatatttcattcaattagaagtgagttgtcaaatatcatgtggtttgattacttcctggggttgtgatcaatgtcctgttggctttattgtttagctttaattttgcaactaaagcagtaagtctgagcttgtactgagtgttgtttgaaaatataatttatgagcaagcctattcactccaagtaaggattcatgcttttagcaattttgtttccttcatattgtaaaaatatgcaatccctgtacgtgttaatccatggcatattcaatcaaaacattcaaactcccataaccccaaaacatttaaacctatcagaatgaagagaaataaaaaagaaaatccctttttcaaaaccagaacccaataaccccaaaacttgagccatcacaacactagtgaagtgaatggtgctgctgaatttggagggatgagtttgttgtgtgcaggggaaggaaacgtacacatgaagagggaaacaagaaaacataattagtcatatttttggatttttaaacaactgcttttttttttttaaataatgaaaaatggcttaaatatgcttttaatccctaataaatatcccatttttgcgttgccccctaatatatttttacttggtgttgagtccctaataaaacaacaattttgttttggcccttgacacttttttttagtccttgatattagttaattttgtgtttgctccctgataaattaacgaattttgttttagttttgactattaacaaatgaaaacaatttatcaggaagcaaacacaaaattcgctaatttatcaggaataaaagaaagtgtcaaggaccacaaacaaaattgttgttttattagagactcaatgcaaaccataattttattaggaagcaaacgaaaaaatcagttatttgtaagggattaaaaacacatttaagcaaaaaaaaaacatcttgaactatttttaacagagttaggtttgtgtaggtttaaaatagaggtgggttttgtgttgaaagtgtgaaatagagggaaggttgaagtaatttactctaaattttagtatcatatttgatatttaaccattgagagaaagtgatgttatgttactaatttaattggagtttctgagaacaacacctgttggaacctttcatcatgacttctttggaggagttggtcatactttttcattggcttaggttaagtatttctagagatactgaccaataacaatattctgccaggtcctgtcaaagttatgtaagcagccaatcattgtgtacataccagagcatgaggtatgccttaaacaattcttattgggttggcatttatctattttatttgggaaggaagaacttgtaattactgtgctcacgtctttcctctaattatagtcaaactgtgtttgctacaaggcaggtcattttttttttttttaatatcaaatattatgtgtatgaataatatatctacagatagataaaggtgctcataacttcgtttttgctaaattatgtttgggattgattggccataaatcttgtattttggaaataacatgcagagaggtgatttagaatatcattttgtaatgataggctgtcttgtgtctactttaaaaaaaatggttcttgtgttgtgtggtcttaagcaaatttatcgtgacaattgtagcttatgaaagagatgatgcagtgtttaaaatatcaggttgcaaaagattttgtcattagaaaaggcattctggtgctataaaggtcctgttatgcgcatttaatgctaattgtggtattgtatgaagctctaggagtaaaaaatagcaagtgatattctgcttaatgctcaatgtggtattgtatggagtcctgtttgtcaatagaattgataggcacattatttggcattatttgtgcagatttgttggccctttaaaccagcatatcttgcatgattgtgtagctgtaatttgtgtaattatatccttaattagttagcccaactgttggttaccatttatagctttttagtaaacttcaaggctagaaatcagattgtatggtactatttaaatgagaattctccaaaggagaacacagtttttatccctatttctctgagtttcacatggtatcagtctaggtttcgatcccaacctttttttttttttctttttcttcgttgccctcctagtctctgagttcccagttctagtctcttgtgcggtactgttcacatcgtggtactgtcacgtcatggtactgttcacgtcatggtactattcacgtcacagtactgttcacgatttctctagtttcttgttttttctcctcctgcgatttttcttaacatcatgtctattgaaaaatatgatatcctctttgtcttaatggaaagaactactccacctgagcattccagttccagatctttgtcaaaggcaaggagctttggggtcatgttgacagaactgattctgctcttgacaaaactacacacaaggaggcatatgccaaatgggaggtcaaagatgcacaagtcatgacttggatcataggctctgttgagcctaatattgtcctcaatctttgacccttcaccacggcaacaaagatgtgggactatctgaggaaaatttataacaagaacaacattgctcgtagtttccagcttgaacatgaaattgccatttttcaacaggataatctctcttagtttctaaattctattctcatttcatgaatctttgggctgaatatactgacattgtctataaagatttgtcaattgaaggacaaactgcactccaaaatgttcatgacaccacaaaacgagatcaatttcttatgaaattgagatatgattttgagggcattcggaccaacctaatgaacagggctactgtcccttccttggctgaatgcctaaatgaactacttcgtgaagaacaaagtctccttactcagaaaaacatggaacaacagaaatctgcctcccttcctatggcatatgcagtacaaggcagacctcaaggtcaagacatgagtactgtccaatgtttttgctgcaaataccatggacattttgcttcccgttgtcctaaaaagttctgcaattattgcaaaaaagaaggtcacatcataaaagaatgtcaaattagaccaccacggagaaatgtaacagccttcactaccactgttggctcttctaccactcctgtttctgtggatcagaatccgcctgctcctgtgccaactttaacccctgaaatggtttaagaaatgattgtttcagcattttttgctttgggtctttctggtaaaacttctttacccaactttccttggtattttgactctggcgcttccaatcatatgaccaacaatgttgctccctgatagaactggaccagagaaatatgattcaagaagaatgaaagaacagagtgcgtagtattccaagaactctcagttacaatgcttagtgtattcgaggtacactacctcctacaattacatgcctccccttttccctcctactctctccttatatctctcagcttaagtaactaactgacagttatttcagttagttgactaatgcttattttctattcacaactttccttctattatacacttgtccccacctattattatctctatcaataccctccccttcaagatggaccttgtccccaaggtccaggtgaggaaaattgctgctaatctcttcccagctttcccagctatcttcatgatgtgggagcccttcccatttaatgagtacttcctgcttccctccttctgttattcttgttttcatgatctgttcagcttgtacttgtagttcccaattttcattcaaacaccttggtaatggctgcacgacacaagttggcttaatagctttcttcagtaacgatacatggaatactgggtgtattctgctatctgctggtagttctagcttataagctacttctcctattttctgtatcaccttataaggaccatagaaccttggacttaatttctcatttggcttctttgccaaggacttcattctatatggctgtaatttcaaaaacacccactccccttcttgaaattctacctcccttctatgtttatcagcatacttcttcatctgttcttgagcttttaccaaattcatcttcaattcctgaatcagctcatctctgtcttttgtcagtttattaatctcttcaatcttcgaaggtaaatctgtacctttaagtaacagtggaggttcctgtccatacagggctgtaaaaggagacatttttgtggatatattgtaattagtattaaaccaaaactctgcccatgctagcatatcaggccactgttttggcttagtaccagttaaacaccttagatacacctccaggcacctgttaaccacctttgtttgtccatcagactgaggatggtatgcagaactcatcttcaactgtgtgcctgcttgcttaaacagctctctccaaaactgactcatgaataagctatctctgtcagacactatcgactttgggaagccatgcaacctcaccacttcccttataaaaacttcagcaatctccttggcagtaaaaggatgagacagtgctaaaaaatgggcatattttgtcaatctgtccactactactaagatagtgtctttgccctttgtcttaggtaaccccccaatgaaatctaaggatatatctgtccagactttagtgggaataggtaaaggctgtaataatcctgctggggataaagtgcttgatttattcctctagcatatttcacattcagccacatattgcctcacatcattcttcataccatgccaaaaaactaccccagcaactctcttcaaggtcctaaagaagccagaatgtcctcctataggtgaatcatgcagctctttcaatattacaggaattctggctgaattcctagccagcaccaatctgtctttgtaatataatttccctcttttaatctcatatcctgccttctccactgatttagttaacaagcctttatatatttcaaacacttgctgatcactttgtaactccttttcccattcttcccactcttcttgttgtactactgaaatagcagtgaaagcaaactgcctagaaagtgcatcagctaccacattctcttttccaggcctgtactgaatttcaaattcatagccaatcagcttggttgcccatttaaactgatcctcattcaaaagcttctgctcattcagaaattttaaacttttctgatctgttttaatgataaattttctgcctaacaagtagtgcttccatttcttgacagctaataccacagccatcaattcccttttataaactgacttgagttggctcctacctgtcaaagctttgctccaaaaagcaagaggctttccttcttgtgataacactgcactaatccagttccagaagcatctgtctctaacacaaatactttagagaaatctggaagttttagaataggcaaatttctcatagctgtcctctactgttcaaatgcagtatcagcctcttctccccacttgaaagcattcttcttcaatagggcatttaatggttgagctatcctcccataatttttcacaaaccttctatagtagccagtcagccctagaaaacccttcagccccttaacatctctaggtttaggccactgattcattgcttctaacttgttcttatcagcctccacccctctaccagagataatatgccccaaatattccaatgatctttgcccaaaactgcatttcttcttatttacatataactcctgctgctgtaaaacttgcaacacagctttaacatgcataacatgagcctccaaagtctcactatatatgagaatgtcatcaaaaaacaccagtacaaattgccttaagaatggtctcattacctcattcataagggcttggaaagtagcaggtgcattagtcagcccaaaaggcatgaccaaaaactcattgtgtccttcatgggtcctaaaagctgttttctgcacatcctcttccttcattctgatttggtgatatccagccctaaggtccagctttgaaaaccactcagctcccccaagttcatccaacaactcttctattataggcatgggaaacctatcaggcaccgtaattttattcaacattttatagtccacacagaatctccagcttccatcttttttctttaccaaaattacaggactagcataagggctgatgcttgtcctaataatccctgctgctaacatatctctcaccaacttttctatttcatctttttgataatatggatacttatatggtctcaaatttggtatcctattcccaggctgtatgttaatgcagtgatctttactcctatgaggtggtaaactgtgaggtgtctggaaaacctcactaaattgctccaatgcttccctaatatccacaggtacctgtccttccctttcattgacttccacaactttcaattctaccaaaaacccttgatcttcctgcaacaaaactccctggatagcttttatactgatggcagccttgatcaactctggttcagccctcagatttatttctttttctcccaccttcactgttaatattaatttctcaaaattagcccgcacctcccccagactagccagccattctactcctaataccatgtctgcccctcccaactcaaacagataacagtcttgagttatatccaatcctggtagtttaatcaccaagcctttacacatcccttgatatctcaccttgtggccatcccccacctctactgaatagggattagttgcagtcacctccaattttaactccttcaccagctgtgatgaaataaaattgtgtgtagcaccacaatctattagtatcaccactcttttttctttcagcagtccccataattcgaaggatcttttagtggtgaacccttcaatactatgcagacctaattgatacaactcttccttttctattttttcttcttcctgcaacacttcttcctcctcttcttcttccattatcatcactcttaattgcttgtttttacaaatgtgggtagggcgatatttctcatcacaagtgaagcattcccctttcctcattttttcatttacttccatgggagatagtttgtggaaatttttttttcccttccaccctttattgctatttttattgactacaccaccctcaactccttttcctcctatatgagacccctctctccaactcctttgcccccaagaattaggtttctgcatcacccaccctttcccactgtttctgggcaacttagccagcactcttattttttcttctacttgtcttgccttccccatcacctccattaaattctttgggtcatacaaacgtacttcagcacttatttcctctttcagacccttcaaaaaaatttctactaacattccttcatctaacccttttatggttcccactattttttcaaattgacccacaaattcttgcacattctcctcttgttttaaagctaaaagattctgaaaaggattaccgatcatagctccttggaatctcttggtgatcgccgctacgaaccttccccacgattggtgcggattacgctgctcccaccattgaaaccatcccagcgcatctccttccaaagcgaccagcaccacttccagtcgttctccgtcgtccaccccttgtaatcagaaataccgctcaattcgagccagccacccgaaaacgtcgtcgcccccaaacactggtatctccacgttcttccatcttgatcgactttcactttctcttcgccgcttaaccttcatcgcttctcccgccctcacgtggtatctttcactttctcgttgatttctccatcatcacggccaattgctgcaccattgcctcgatagacccaaaccgtgactccaacatctctcgcgtctcatcaatcgccttctccatggcatcaattcgcgcttccattttgttgttgttgcccttcgaacccattcaccctccaagccccagaatctggagctctgataccagttgatagaactggaccagagaaatatgattcaagaagaatgaaagaacagagtgcgtattattccaagaactctcagttacaatgcttagtgtattcgaggtacactacctcctacaattacatgcctccccttttccctcctactctctccttatatctctcagcttaagtaactaactgacagttatttcagttagttgactaatgcttattttctattcacagctttccttctattatacacttgtccccacctattattatctctatcactcccttaccaatgttacaaattactttggtaatttgcaaatacacactgcagatggaaacaatttacctatcacagcaattggtgatatttcctcatctcttaccaatgtttatgtttcccctgatctcaccaataaccttatttcagttggtcaattagttgacaatgactgtagagttgaattctcaaaatctggttgtcttgtgcaggatcaacactcaggaaagatgatcgtgaaggggcctaaagttggacgtctttttcctctttattcatcgttgtcaccatgttcttttttgccttttatttcttgtaattcggcaactattaatttccaattatggcataatcgtcttggttgcccaaattccaatgtacttcatgacttgatgaaatctggagttcttggcaataaatactccccatctttgagtgttgttcaatttgattgcaattcttgtaaacttggtaaaaataaaattctaccatttctagttcatcaatcaaatgtaaatcagcctttttgacataattcacaatgatatatggaaaatcgaacatgtaatatctcatgcacattataagtattttatcacttttatggatgactatagtcgtttcacatgggtctattttttgcgatctaaagctgaagctttctctgcattcaaattctttcatccctatgttcaaactcagttttcatcaaaaattaaaactgtgttctaacaatgggggggaatacacatctcatttgtttcaagagttcttgtagggaaatggtatattatctcaaaggtcgtgtccttccacaccccaacaaaatggggtagttgaaagaaaaaaacgccatcttcttgatgttgtccgtaccttaatgttggactcctttgtgccctcccgtttttggtgtgaagctctctcaactgctgtccaccttattaatcggctgccttctcaagccttaaataatgattcccctttcttaaggttatttggtaagctacccaattattccactcttcgcacctttggttgtgtctgttatgttcatcttcaaccaccagaacgtaccaaactcatagctcaatctgttaaatgtgcttttcttggttactcagctcatcaaaaaggttttatatgctatgatcctcatttaaataggattcaggtttctagaaatgtcatctttcaagaagatacatatttttttgctactaaccaagacactcactcttctacatccaaatctgttttgccattgtttcctaacagttttgcagaagaacaagctcgccctcctttcatggtctaccaaagacgtctgactgttccaccaattcagccttcaatccctccaaggccacctcctgatcattctctagctgctgatccgacacttcaactaaaaccagcccttttacgtcgcattacttgcattcataaaccaccggaaaattatggtttttttgaacctttatctttgacagcaactttagcatttgttcctattccttcttcatataaataggcaatggagcataaatgttgacaggatgctatagaaactaaacttcttgcactagaggaaaatcaaacatgtgacatttttccatgtcctccatcggttaaacctcttgacagtaaatttgtattcactataaagttgcgttcagatggatcaatagatcgatacaaggctagattggttgttcttggaaataagcaagaatttggcctagactatgaagagacctttgcaccggtggccaagatgactactgtgaggactattattgccattgctgcatctgaatcttggcaaattcacctgctagatgtcaaaaatgccttccttcatggtgacctcaaagaagaagtttacatcaaacttcctatgagtatgccctgaccattacctaatactgtttgcaagctaaaacgttctttgtatggattaaaacaggcaccaagagtgtggtttgaaaagtttagcacaactctacttggcttttccttcatccaaagtagctatgctccatctctctttctacaaaggacctcaaaaggaattatgatcctctttgtttatgtggatgacattattgtcaccggctcaaatcaaaagggtatcactacaatcaagcaattgctgcatacaactttccacatgaaagatcttggacagctcacttgtttctttggattagaagtacaattcgaacaaaaaggcatttttgttactcagcacaaatatactcaagatctaattcagctagctggtctcatcactgcaactacggttgacactttcatggaagttaatttcaagttaagacgggatgaaggtgaactcctacaagatccaactttatatagaaagttggtaggaagtctcatctacctaaccatcacaagacttgatatctcttttgctatccacacagtcagcaaattcatgcaaaatcctagacacttacatcttacagcagtacactaaatcattaaatatttactggccactcccagccgtggtgtcttctttcctacaggtgcaactatacaacttcaagcatacaacgatgctgattgggctggatgtcccgacacaaggaagtctactactagctggtgtatgtttttaggagatgctcctatctcctggaaatgcaagaaacataaatctgtctctaaatcctctagaagtagaatatcgatccatgtttgcagcatgctctaagattatttggatacggggtcttctttcagaacttggttattcacaagcaacaccaactccgttgcaactccgttgtatgctgataatacaagtgccatacagattgtaacaaatcctgtataccatgaaagaacaaagcacatagaggtcgattgccattcaattagggaagcctatgaccgcagaattatcactctgcctgatgtctcaacatctgttcaactagccgacatcctcaccaaatctttgacacgtcaatgacataatttcctagtcagcaaattgatgcttgtagattcactagcatcaatttggagggggggtggggggtgtcaatagaattgataggcagattatgcatgtttattgggcctttaaaccaacatatcttgcatgattgtatagctgtaatctgtgtaataatatacttaattagttagcccagttgtaggttaccatttatagctttttagcaaacttcaaggcttgaatcagattgtgcgatactatttaaatgagaattctccaaaggagaacacagtttttataccaatttctgagtttcacactgttctgcgcatttaataaatattagttggaagtgcataatttatttgaagatgatagcttaatgattggataagatgctacttataggatatataaaagagattgagaagtgcaagtataatttaactgacattggttggatgtaaacattgcttgacatatggaattaaggcaggattgcagtttcctaaggcaggatttgaacttgaatcaaaacacttctaggtttagtgattataaggtctgagattttggaagttaaagcttaaaatgatgctttaaatagacatgactgcaacgtttgaggctgcagcaaaatttaagtgtgtacttctctaggttttgtgaagctaaggcaagcgttattaattagagttatgaaaaaacaaaaggaaagagttcgaagagcagatatgtgcctttgaacaacccccattggcacaaatgtgatgagtaaaatagaatgggaaacagcaggtgaaggtaaaatagaaataaggaaacttgagcctttaagcactcaattgtctgcgacttgtatgtccacaactagagtaaattggaaactaaatgcaaaaatgttggcaaaagaaagcctgatactgtcagacatggatccctgcataggatagcactggagcaaagtaaggagccttttgaatatcagaatgtaggaccattattaaagtctcactgtttggccaatgtttttattgggcacttatagcctggccttgtgcttccaaaagaggctaaaatttatataactagtgcgtggtttctatctgtagctgtgaagatgcttggttttacattctaattcactgataaagggtttccactgatcagactctgacatgattgatccttttatgcccatttttattttagaattggggatcctaatcatttaattgcttttgttgtatttattatttcagtgaactcacagaatttgcttgaaattaagccgtgtgacttatgattgtattctatgtacctactttttaaagctcttttctactcatatatgaatgtatgctttgatctctgttataacttataaggttgtataattatccactaaaatttcctgttgtctgttgtaaaccacatgcagcatagaggtggtggttttggatctggtttcattcccattgcagagtatggaagtgagtttaaaaaaggttctagcagaaaagctgtgaggctattgtacagcggtaagaatcattatgatcttctagtatgaggaaacatatgaacgatgaagaagcaagaaaatgagtgggagattcaaatgccattttgtaacgattgtgttataacgattgtgttatgttagaatccacatattttgtttattttctttttgttttacccttttttgttagagtccaccgcgaatcccttgttttggtacttttcttaaaagttagtggtaaaatgcttcaaattaatttgttggggtaaaattcattaaaaattgaaaagttgggataaaaactgcaattaaacctattatttatttatttaacttgtatgatcttctagtaaaggttggtcccgtatttggctggaaaccaattcgaccttggtggtggcagctttaaaaacgtttcgcttgttcctggaaagttggaatattgttaatagatgaaaaaattgtgttaatattttgttccattgaaattttagagtttcacacatttacagagaaggttatgagtgggcgaatcgtctagcggatcacgacgcaattttagatgactttttgtggttttgataatttaccatctttttgtaaagaaactttctttagaaataggtttggcctccctaactagtaactacaggttttcgtgatgaattttttttggcatgcattttggttgttgtcccctaatgttttttctgtttttctttcatcttttcgggtattcaggggtggttatgatggttgagaagggaagtatcaactagttggaatcttttatctctgtcattccttagctcacctttacaaaaaacttgtgtgatcttcttgagttatttaggattgcactattggagaatcaatgcgttttttttttcttcttcaaaaagtcgtataatctcaagtatcaacgaaaaaagaatgaagcctaaaaaatgtcgaataccctagatagaacaggggtgtgatgtattattgttagaaactaaattttaaacccgtgcaaaagtatatatattttaatatttatatttagtatttatataaaaatgtatacaattaataaatttatcttttaaaatatttagtaacatattgaatataattatatcataattgagaaagataactaattacatttttcattgaggagatgttatctttaaaaatattaaacatgatgaaatttattttgatttattctttctctaagtaataatgatgatataatatctatatgaaatgtataaatttaaaaaatatattaaatataaatttataattatttaaatgttattctatacacatgtacttgaattctgtatctttatgattaatagtttttagtgtaaaattaaattattattttaaaatgatattttaatcattttgaagatataagttttaattatgtggtattattaaagttttgaactggttaaccttattttgacgtaaattgaacattatttatcaatgcaatgatatattattattatttaattttaatttcattgcttgctatatttcaaatttattatatttaattgcttcaaaaataatatttatctatatagattattgtgtgatccaaattttatatcttataatttaattgttataagttttgtttatctaaacaaaatattagtaagaaaaaaaaattggacgaaaatattggttgatgatattaaccgattattattatagtatagatcatatgatgttgtttagcaaataaaatgagaggaatttttttcttctttgttaagaaatacttatagtcgtataagaagtaatatgtttattggtataaaaaatccaaataatgtataataaaaaatgatcctatataattttttttatgaatagcaaactgtatttagtaaaagtaaaacatttattaatatgattttgaaaataaaaatcttaatatatcaatattgttatatttataattattttataatattattatattatttataatcatagtacaataataatacaatggtagtaaaaataagtgtaaattaaaaaaaaaagaaaaagaacagaaaagaaaaagaaagaaaaaacataaaaagaaagaaagaaagaaaatacttaaaaaaaaaaagagacgtaaaaaaaagaaacggcaaaagacagaaaaaataacagtaaggattttatttgaagaacaagcaatggttttaagaaaaaggacaaagaaagaaaaaaaaataaagagaagaaaagtttttggtgggaacactatttatgttattaacctgtttttattatagtaatggactagagtataaggaaacaatgagataaagatactaagatagtgcaaggatgagagatagaaagaccatgagaggtatcatggctaaatggtgccatagacccgaccatagaagtgatagacttgatagagactttcgtatgggtaaagccagagttagatggcagattgttggagagaagagtcttgagcattggtagagttcttagagtacttattgagatatatgtcttattcttttaagtttttttttttttttcatgaaacagataatttggagcatggagtcttgtcattaaagacataatttagttatgttttatatttctatgtatttctgttatgtgatgtatgatttaagtgttacaagaaataagttgtatttaataagacatggaattgaattgtcatttatatctttattcgttagctttgtgtgttattgttagatgcatgtttttaatttcacattttagaaaaataagcatagttacatcaatacatcttaggatgttacaaagcctgtctaggctttagcaaacaaaaagtttgattataacaaatcaacttacaaaatgaggatatgggagattaagcacagactttgcgaagcaaaggttatgaatcttttagagagtgtaaaggtagcgtctataaaagcttgagaggttttcagagcttaaggtttggagtaatttgttctacttcttcaatgttcaagtcttctttatatagctatggaaaattgtttattgataaagagacatagcttcatcttcatattcccgttctgagactccacaaatgcatgagaatatcttcacatttctccttcatatgtgtcttgattagagcgaagatagacaaaacaattgtctcgtttattataaaaaaaatgtgtttgcatatttacagttctccaggacctttacaatgattctgtacaccacattgcagagattgattggtctaaattcccttaaagaggagcggtgatatgttttaggaaataagagcattaaagtttcaaccaaccttatcacaaattccttattacaaaagccttctttactaggcaccaaacatcatcacttacattggcccatcacatcttaaagaagataggttaaaaaccatctggacctagagatctgtaggatttcatacttttgagtgccttgaaaacatcttattttttcaccatcttaacatgttggataatttccgtttttatctgatagatatcttctggtttttatctgatagatatcttctattttttatttgataagatatattctattttatttgattagtcaaatcaaataatatcttgatggcataggcctagcccaattcatactataaatagacgagtagggatacacagaaaacacacagaaattgagagcctcaagtgacagtcttgagtggcatatttgagcgagcctgcgtgctctgcatatttgagagattcttagagagtttgagtgaaacaatctaggtttcgtttgagtgatcaccattgttggagaggttgagtgtaccaccacattggtatgtctttaattcattgtaacccatattgttatagtggattttgatactggactaggtcccgtgagtttttccttttctcacattgagtaaggttttctcacgtaaaacaaattatgattgtctctctctccctttgatcttttgattttcgcttccgcaatttgattcaatttgatatttgagggtccgagatacccaacataacaagaggcagtttgccttcctttgatagctttgcgggttggtgtatatagattagagcattcccccacctttttatactcaaaatagatctttgaagtatcttactccttcctccttaagtatgtcctcatttgtatgtcaaatccctaagggcaagaagcctccatgcactttgttacgcttcctccagatcacactttaagcatggaaaatgaggtatttctgcttcttataagaattcatttctccctagatttttgacacacaatgtctcttctcaaaataggatatctttatattctcttaacaggttttattaagtatataggaaacttacagagtaaatattctcgatagctttttagatacctcacggacaagctttaatagtccctttcttgacaaaaatatgtgaaatataactttattaaagaatattgaatcatccatgacattaagaatggattgaacaacatcatttggacttttcttccaagcatcatggacatgcaacactctgaaatttctttcttcatttattttttacacgtgtaaaaaaaatcactattaaagactagacagtggaaattttgcgctatgtaatttaattatatatctgtgtgattttatttattttctgtatgatattaattatagaagtttaaagttagttttatttttttagtgtaaataatttatttggttagttgatagaaatttggaaactatctaaataaaaaatttcatctgtagcggtcgcatactgagtggcggtttgatttgactctgtgtgagattgttctttgtgaggattactttggtaacatagattcctaggaaaattagcataataacctaggcaactaagataagatttactaattttggtaaaaagtaaaaataatcagttttggcaaatcctatcccttccattttcgttagttttgcaaaaagcaaaaaactacccatttgtagtatggcttggcatggtcaaattggttgctaagagggtcattcaaagtgtcacaaagccttgtcaaagagagcctacaccatagcttattggcctttgtgaagaaaaattcttttggagtgttatcccttcatttttttgcacgaaatcaaagcttgagggaggggattttagcttcctagacttgattcctctttattctcttgttctagtttatctaataacttgaaactatcattttgttttactcatgaagggaaattttgaagaacctaaatattcttcattctccttcaagattttgtgatttcttcaagtggtaatggggacttctccaactcttgaatcatgtccttgttgttgaacttccttgaacatgttgttactttgaaattttcgagcttgtttgaaaattttgaagtgcttattgaattatctcaatctgatgaaccaaccaagaagaaacaaaaagcaacaacttcaaaatgttggaactttttcactaagataggagtgggtgatgatgggatagaaagagcaaagtgtaaggcttgtaaaacaaagtataaaatgaggggtaaagcatatgggacatctcacttaaagagtaatatctcaaagtgtaagtgaattaaatttgaagatgttggtcaaatgatggtagacttataaggaaaattgaagtctccaaagttagaccaaatggtgtcacgtcatatgtgtgctgctgcaaacattgagcatgatttgccatttaagtgtgttgagtataaaaagattagaagtttgattaagtatttgaatcctgatgcactccctatttctaggaataatgtaaaatctgatgtactaaacatttacaagagagagaatgagaagctataaaacatgatgactaatattccaaatagaatatgtttaacttctgatttatgaacctcttgtacctctgagggttacatatgtttaactgctcattttgttgatgttgattggaagttaaatagtaaaattcttaatttttgtcatatgcttccttctcacactagatttgacttggattcaagggtatttcaatttttgaaagattggaatagagcaaaaagtttttttctctcactttagataatgcatctgccaatgataacatgcaaaacattttgaaaaatgatcttggaacaagtggttggttattatgtgatggagagttttttcatattcgttgttttgcaaatattttaaatcttattgttcaagaaggattaaaagtgactagtgatgccttgcataaaattagagagagtgtgaaatatgtgaagggatcggaggctaggatgataaagtttaaagaatgtattcaacaacttggccttgagtctgatgggaggcaattgtgtctagatgtttccactagatggaattccacttatatgatgctttgtagtcctctcaaacatcaacgggcatttgaaaattttcaatcaaaggatcctaattacaggtggtgtccttcagtagatgagtggagaagaggagaacaaatttgtgagttcttgttaccattctatgatactacaaatttgatttcggacacttcttatcctacctctaacttgtatttcttgcaagtttggaaaattcaacgtgttcttattgagagtttacaaagtgaagatgaagttatagggagtatgggggaaatgatgatgatgaagtttaagaaatattaggatcagtataacaccattcttacatttggagcaattcttgatccacgtattaagtttacttcattgagttattgttacttaacaattgatgaatctacttgtgaggaagagattcaacatgtgcgaacaaagttatacatgctctttgagaggtattcaaacccaagaaacattaataatgttgcctctattcagaatcttcaaccaagacccaaactagttcttcaaccatgtcaaaggaactcaagtgaataaatcaaagaatgtttggtgtaagtacatggttattaattattattattattattattattattattattattatgttattatataagtatttacttttttatgttgtctacttcgttgattttattttatttttttatgttcaacttgtcatatgtaataggaattgaaaatgcatagtagtcaacttgcttctaaagttggaaagtcacaacttgatgtttatttggatgagccaaacttggattttcaatattatgaagagttggatgttttgcaatggtggagggataattataatcgcttttcagaattatccataatggctcgtgatatgttgagcattcctattactacatggcttctgaatttgcttttagcattggatcacatattataaacaagtatagaaatcgtctcttgttagaaaatgtcgaagccttgatttgtactcgtagttggttgcatgagtttgctgagaatggtagtttctttcataattttgcattgccaattaattttttttaaatcatcattatcattagctaattttatttttattttttttataatttgtagctgaggatgatgatgacttttgtgctttaaacatggattcatctttttccaagggatcaaatacaataactattgaagatgcttagatgcaactacttcttcaatttaattattttgcattttgaaagttgtaatgtttctaacttgtttatttgcaaattttaaatttaatgtatggatgttgctttgctaactttattataatatatggatgctaagatgtagactaaaaatcctttaagtgttaccgactgttttcaagttgtgatttcaagttctccttccattattaatgtgattgaccaataagtgttgcttactattttcttcattttttattggtttcaatggatcacttgtgaaaccatggctgataataataaattttacatttagtgcttcatgaattctatttacatcatgtatcatatcattttttttgtatttcgtgttgatttgtttctagtaggcatgcgttttaattttatattaaaaaccattgttataacttataacaaattaattatattttttaataattttctttacttccttttttaaaataacttttttttaattattttgatggattgtcctactaacttgttagcccacattaaaatgaaatggactaacattttcaacctactttttaaaagtgagtcaacttgtcccttttttagatggactgacctaatttaccgtccttactccgaaatattaaaacctaaccttaacaattgccccttttcccttttaaaataaaaaaagaaacaattgtccctttcgtgatggatcaccgttcccaaaatcccacgtggcatccccacacgacgacacataagacaccgcatttaacactaacatccaaccaaacaaacactgcagcaagaaaagaaacaaacactgttgaaaatcgacaaccttttctttaaatttaatttgccatttatcattttatttatagccatttatttgtttcatttgttatccgttacgttaacgtccctgcctccgattctttccccttctcactttctttctcccttttccctcacaacacaatacaacacaagagcacacgaataaacgcccagcacgcgaatcgtaattattagggtttgcgcaccctcacaattggtttgagatttgcgaattcggcgacgatgatgggggaaggagtgagcaatggagggatgctgtaccacgaggtgcaggaatcgaagctctgcgcggtgcattgcgtgaatacggtgttgcagggcccgttcttctcggagttcgatttggccgcgctcgcctccgatctcgaccgcaaggagcgccaggtcatgctccccgcgctctcctcggcggatttcgaatcgcacaatgtctcgctcgacggcgatttcagcatccaggttcgattagggtttctctttccccaatttgtttgtttttttactctttggcgccgttgtttctggccgtgtgcgtggaaatgtgactagcttgtcgtcgttttttgttttggaaagttctagttgctatggatggtttggatttttgttgaatagaaacggtttataacggttcttttgtttttatataatgataatttgaggaactttgttttttgtgctcttgtggcgctagctgctccttctattgttcaatctagcttattgactatggtgcttgggtgaatatgtttttattttatttttatgctggagttgacttcatgatacaaagccttatggtttgtgaagagttactgcttgtttgacataggatggccttgtgctttgtgatgcaaatttagtttgactaattgaatattttccatatacttactttacaatatgattgtctattaaagatagttcttggcatttacacgtatgaatgggaagatggtgatgatgagatgtaatatatgtttcaaactttcaatgttttgactaagcagatttccttgcttaaataaatactgcatgcacattgcttcaatttggagctcactacattcaactgcatgcctctgacataattgaattagaaataggatgcactgatgttttatgcatgttgaaattacgatcccatttggagtttgctattgatacatttgtctgacctctatttccattttggctggccttcctatgcacgaataatttgttttagctgtacacttttggctctggtatttcactgtgtaattagtacagtaaataggtattactttgacagtttttatacttagattttgatgctgttatgcctgaggaataaataagaaagaaaaatacaagaagatgatttgaataattacaataattatgatagtgttgaaatttcaacaattaaaataataggaatttaatacattccctctattttcatacttaatcaaataggaatgaagagattatttataacaataggaaattcataccttgtcaaatcctgttgaatgtctttgaagtagtaggagacgtgtcttttctgtttttgggttgagctcaattttacttcccaggcaatttttagagtgtttgctaagagttggaaaggacttggactaattattttgtaattctatgtaattgatatattggatgatgattctaattcttaaagtgtctccaaatatatcgattagaaggtccaattccatgctcaattctacacatcaaacagaaacttaatggctttgaactaacagctgtcagaagtaagtagagtaggggcgtatcctagtctgattaaaacttcagtctgatttttatgttaatttatcatcccccagctgctttttatggtttggattgcacgcatgagttgcctaatccctagggtttgatccctttgcagaatttttttttttcctttctgttttttattgattttgtaatttggaattttgatagttgtgatgcagttttggtattggttttttagtatctgttcataactgaatccattcttgtgttcataattactgtctttttttttctttttcttatcggccaatgttagttgttaaatgttattatttttgttagtggagggatttgaacccacgacctctccctcccacccttccttcccctcttcacttttttcttaatcacccaaccaaccttatatctccataattagtgtctgttgtttgggatgatgaaaacatgtccagccaactgaacatagtcaaatccttgtcaattctgaaattaaatgaacatgttggaatgtaattttatcctttttttgtaacatgctttttcgttttacatttgtaaggttttgcatttgaagcctgctccctctagtcacctttgtcaaaatgtatgtgtaccccttttgcccctccctctttagagaaggcaaagcatagaactcttttaattgcattggttcatttctatagagaagtcaaaatatttttacctataaatttcatcctttcttaaataaccatataatccaaatatttggatgtaatatgtttggcgcaacacggttcttttatcagtttaccatatgagtaattttatgattaaagtttattcaataaatggtttagttaaatgatgattgatctgagcatgccaattaatgaaagaatcctaaatcttagttggttctttggacaaaacttgagcaaattctgcaggtgtttgcttagttgtcaatactgtgttgcggcgctcaaaccctaaagtgggattgtggatagggatgaccactattctaaattatttttttttgtacctattctgaaatttttaatatctgtatgtattattttagatttttacacacatataatttgtattatgtaacaatatgtttattgtttaacaatttgtatattctttgttacttaatgtatatttctcattattatattaatttttgtcttgtttttactgcttttcattggttcgtgatcagtttgactggttttctgatccatctgttttctgggttgttgtcttgattggtgtttgaaccagctattccggcctgtttttttataactatggttacaagtagttttttttttttttttttttttttttagtgaagtcacggaaaagtttgttgcatgcatcaaatattaattttgggcaggcaatttaggatttggatcctttgcaattttatgatacttaattatgcaaagccttttctgtaggttttacaaaaggctctggaagtgtgggacctacaagttatccctcttgactctccagttgctgagcctgcccagattgaccctgagctggaaaatgccttcatttgtcatttgcaagaccattggttttgtatccgtaaagtgaatggggagtggtataattttgacagtctctatgcagccccacagcacctttccaagttttacctctctgcttatcttgactctttgaaaggctttgggtggagcatattcctggttaggggaagttttccaaaagagttccccatctcctcatctgaagcttctaatggatttgggcagtggctttcacccgaagatgctgagaggataactaaatcttgcaactcagtacaggctccacaccagagagttaacgagcgccaacagaattatgatcagtttctttctcatggggaaaccgaaatgttattagacatggaagatgaggatctaagggctgctattgcagctagtctgatggattcgtccccagttgtgacaaatgctgaagccagtactcctcaaaatgataatcaaagtagtaaacaagtggcaaccactgaagctacccctctaaatgatcaacactccaaacaagtggaacccattgaagccactccacctctcaatgctcaaagcaacaaacatgtgcctgctattgaagcgggttctcctctgaatgatcaaaacagccaagaagtggcatctactataggtgataacacccaagatgataaccaggaaaaagaaaaaactgcctaagagtggctcttgtttgttcctaatttgtttttgcaattgaggacaataatctttgccagtttaggtggtcgaaacatacatcagtggcttaaagtcatggtgctgtgcagtatacacattctcatttcaattgcatgatgtataaactgtaaggaaaaccctttagcatttccatcaattacatgatggttaccaagttttgacaatgttttggaaaaccctttcggcatttctgtgattgtgattgacaccaagttgagttttgaccatgctgcatgatggtactgctataataaattttcttatggtggtgattacgagaactcgaccgattgaacggaacccctcccctaatttgaagacactattattaggctctagatttcaaggtcacttcgatacaacagtacataagaatattattaggctctagatttcaaggtcacttcgatacaacagtacataagaactaccggctgtgtttttgtcgtaatcaacaattttgttttcaaaagggtttaggaaaaacatgaacaaaaagaggacaatggacctttttttctctccttgatatcgactttctattgaggtgggttcaaaagacttcgatcaatgtttaataatgggtccgatcatctatccagtctgggcagttaaacaaatacattattaattaaaccgcatgactggatatttctattaaaaagtttaaaattttcatgccttggctttaaaataaatgtaaaaaaattaaacatacgagtataatttactctaaaaattaaactaatcagtcttagaatgaaattatatttacaaaagcaaaacaaaatagatgaaaacaaagccttaatgatggaaatagatgaagaactcaatacctcgccctagtcaattaaactagaagcgagaaaaagtgtacatcggtgtgagatagagtgagttcagtacctgagttagggatttatcacgtttctgaagaaacttggtctgcttttaaaaaatagagttagagattaaaaacccattgtcgcgtcgcacaacaacctagggattatgcgaagctctgtcatgagattgagaacatgcaaatttcaaagagaatgaattcataggcagcgattgagatcgaagaaaagagaatgcacacaagtttagtggtcacttaaaagtagaaccctagcgtgaaaagaaattgtggaacaaaaagagaaatagagacgctcgtgaacgtcacgaactgaaatatgaacgatgaagaactcgcaaacggtgaagaggaatggaacgtgaacgtcgtgagaggaagaatacctcgcaccccctgaacgctaaagaagaacttgtcaacaagagaaagaagaacaatactcgctttcgacaacttggcggttgttcagtctccacttttggaagcgggagtgcttggttgctggggtttccttctcgtcaaccaattcggttgtgtcagccctgagattggttggtctaacatttatgagttgcgtggagaaagatggatgaattgtggtgaaccctaaattctgaaactaattatgaggagataattattgttattattattcttttgtttatcatattgcatattttgttttgtttagtttattatattttttacagcatattagtatatgttatgctttaaattaatatattataaatatatgatttttaaattaaaagtatactatcattctatcaaatttagtattggcataagtaatcaaacaattggtgctggtgtagttgagttctctttttaagcaacccaacgtactgggttcaattcctctccagcaattgggacaacatgcagttagccagcagcaggtacaaggatgcggatcctctcctgaaccgccgtttgatcttcatagacgactaagattgaaagttataaagttataaccaaaacgaaatgctaatgtggctagaccttgtttctactttcaaattaatgtattattatagattttaaacatattaaatatttaaattgtttgtttattatgaatatttaaaataaacatttaaatataattatatacagatttaatataaatattttcataatataaatttataaattatattttaattaaaattcatgataaataattattttaaattatattttggagaaaaaaatatttatagtctctttactttctaaatttcttggttttaggacctctaattcacctttaaatattttggtctttaaacttttaataatcaatattcttatatagaagaattcattttaagtttttagatcattttttatagatcacatgatatcacatgtaaatttttttgttatttttgctttagtagtagaactaattggaattcttagactgttaatggcacaaaaaaaaaatagaacctcttttttctctcaaatggtattaaaaaaacaatattcttaagggaccaaaaacacttatttttaaaagttcaaggatcaaaatatatacaatgatgaaataaaagtactaaaattaagaattttacaaattatatgaactaaaacatactccttttgaatttaaatataaaaaattattttacgctaactaaaaaagttggttaacaataattaactgcatcaatcttaattaaaaaataaattattttcttaaattacaattcattgaaatttgatatattaagaaaaaggagtcattgaattaaattttctattaaattatgggtactttagagataaaaccgttaaataaaataaaatttgttgagaattttatatatttaaggtcaagattaaatcatttttttctcattcaaaacgggggagagtattttttcacttatattttaatttatatatttatactatgaaatatttatataatatataattatatataaatttttatttaaacattatagtttaaaaataattaaatatataaaatataatttaatttatatatttaaaatataaataatacattaccgaaagtagaaacgagttccagccaacattaacactgcgttttggttataactttgtaacttccaatcctatccgtctatacacatccaacggttcaaaataagcttgctggagaggctggagacactacatgcacgcttgttggtgtacaacttgagttgggaacgatttcaaggagcaatactctcttccattttcagttaccggtactatttttcttttaccaacttttagttactgaatcaatcaagccgttgttgagtttcaattctgaagtttgtttatcctcttttagtgacagctgcatttgttgcgttctgcaccgcttccttgctagtatttagtttgatcattttgcaatgccacgtgattttggtctttctttgattttggatttctcactttttgtggttatacttattttcttccgtgctatgcctattaattaatgattccaaacacacgcaggctaagcatatttattaattttgaatttgatcgagcattttattattatgcatgtaaatgagataatgcacgctggattttaataaacaggatatgctatatatatgctttagcagttttgactggttagtacctttggatacggaagatgggatgccattatgttttgctcactagctgtttgataaaatgctccagttaaatctttttgtataagatgtggttttgttgaggttgatagtgtgcactgttagaattatcgtgtgcttaatgtaatcaacttaaggaattagttccctgagctattggtacggagtgaagtttgaaaattttgaccaatttgtttggttagtaattatttgtggataagaaggtagatagtattaatgtaaacaacacttagatataaaatttgtttatgttgcagggaacggatagtttcacctgttgcactactctgtgaaatggaagatccatcattttttgatcgaatgatcagtcatctgagagcaacttgcaagtatgacttcctgaatatgatgcttatttgaaaattttggcacctcaactcccagtgtcactttgctgtaaatgattgatttttattattaattaataatagtacaaaacaataatagttgtttaactgaggaactgttcagtcatatctataaatctttggaagctaatttcaaaactttgtatattactttaggttaggtgggcattgaatatggtagtatagtttgcacaatttaaatggtagctgtgtgatggtgtttttaacttgttatggcacagtgctcccatggattattcttggagcagtctcacctgatctgattcttttctttattcttggaatttttgtgataatataaggtactatactggttatccaaaggaccttggaccatcacaggttattcattttacctctgagcgtgagtttgtcaaactccttcacgaaggtttccctgtggttgttgcatttaccatcaggtgatctgtagtcagcttctggattctcattaggttctccctaatttgaatatgacttttggtctgaatggaaaggaagaaggaaagtaaaaagactttagaataactgtttgctatttaataatgcagggggaactacacacggcatcttgacaaagtattagaagaatccgctgctgagttttatccaaatgtgaaatttatgcgcgtaagttatttttcattgtttcactctttataagtgttggtagtcatatcaataacatcacacatgatgaagcatatcactgattcatcaaatagaatcacaaaaaattgggcacttgcccttattagtttgcaatgagttggagacttggagtttacttttgactgaggagtgtgtgcactaggtctacaataaaattaatactttgtaatgttactttctgtaatttattgctttggaataatttactatttccttaggttttggttagttattttctatgcactctaactgggttgttattttctggtgctttgtaggttgaatgtccaaaatatcctgggttttgtataactcggcagaaaaaggagtatccatttgttgagatattttacagtccaacacaagtatggtattccttagtccttacctgttcactgcagtatcatgatctcatcaattcactgcctattgtagtataacatggttttaattcataggttaatcttttcagtacagtatcatgatctcatcacttcactccttatactgctcgtggaattgggaaaaactaattataatagaagtttgttttgattgcatgactaagcagagcatgtattcagctgcaataacatggtttttaattcacaggttaatcttttcagtgactactaccccatgtaaatctattttttaacttgagacttttgtttttttatacaggcagctaaccagggaagggtagctgatgcaaacattactaagtacaacgtgaaggtcttgcccgtaagttgttttgctctccaaagccttgaaagttcttcttcaggcaaattgtagcatctattactgattatgattatttgtattatgaactccttttctcaaacaagtatgcaaaatatatctatatataggtggtaaatctagtaatactgcatcaaatattttttgaacctgcctgacaaatatctttatttccatttgtgaaataatgtaattttgtccgattttcatctgtgcacttgcagttcaactacgatgtgagtgcttatggatttagagaattcttcaagcgacatggtatatgggcatcagatccaaagtaggggggaagttttatcttttatacacctaagttccataccccatcatgctacctgttttaacaatctgtaattttgtatatcttcacaaattcacaatttggggacaattttatttatctgtatgccaatcgagacatgactctaagtctctgtgtttacatgcttgagactagaggattgtattcttcatcggtcttatgtcgatcaaggtattcctccatatatcccatgatgattgattgatcccataccaatgacaataatcacctctataacctccctaaactggttatgattattcaaagaatgtcgttacaagatgtcgataatagtgatttatggaggggtcaaggtccaaggtattgattactaggtgaagggggaggttgcgtgaataagaatctctgaagtcgaactaagacgacatattatccttgtcactgaatgtttttatgttagatttggtaaattcttggtaagacttagttagaggaaaacttctatatgagcaactataaaatgtcatctaaccaacttgtgacatctataataatcactaatgacctctacaactaattagccagacttgactctcgttgctcaacacacaaaacaaaatttggtaagcaattctttcatgcaagttcaagaacccaattaaaaagaaggtttttttattgacttatttaaaaatgacaaactgctcaattacctaatacaatttttcaagtctctaaagtcacacgtgcatgacaaaatattctcacttatgcaagttgagatactgatttaaaacttacatagttgcaaaggtaagaatagttgcctcaaaatgtgagaatattaaaccacacagacttgataatttttaattagttgtcttattttttttttacacttttgattccttaaacttgtttgttgtgacctaattaaaaaaaagtacaagtttaaaaatccaattgaagagaaaaaaagttcaaaaatctaattataaattataaattctcaaataaatctagacctataaattaattttatctaaaatgtacaccatgcactgtgataccgcatgcttatcacacactaaggaaaaagcaaccacaaccgaaatttccgtttcttgagattttaaagatgctatttgatttatattttaatagaattacttttgattaaaaaaaactttaaatgattgaacataattaaattgtgtgttgaagtaatttttatggataaattataatttttatccactttaattcttaatttacgattttgatcttcttatttttttttcaattttttttctaattctcaaattcatagattttttttaattaattaaattatttttaaataataaatgttaattttcatctcatcacaatattaacacatcattagtcaattgcaaagttaaactgtaagattggatcaaattgcagaatttttaaaataaatttagggactaaaacttggggggggggggggaggggggataaataggccgaaattaaagaattaaaactataatttaacttaattttaataacagaatttaaattaatatatatatatattatgacatgtaaaattaattttgagtgcaatctaaacagatacgaagtcactcacttaattgctgtcatttttttttcgtcacatcaactttcggttggatgggtgcaaatgtccaaaggacgtgtgagccttacctaaaattttggttttctttttccattttttatttcccgtcgtttgattgaggaaaatgcaaaacaggttgatttaagccaaaagcaaaagttgcaatggcaggtcacttttatagtttaatataacaggattttttttttttgaatatttaatatacacaggaagattacaagaatatagatttattatttttatttttaagattatactacttatttaaccttttttttaatatacttagactttatcataaaacttaagactatataatcattaaaaaaaactatataattcaataagtgaacatcacacatttaatttatgagaaaagatctaagtttaatctttagagagggataatagactttaaatcctggacttttttttgtaatattacatacaataacataaaagttctaaaattattaatagtcctattttaggctgataggcctaacaacttttttttgcaagccttattataaaatggagatttaaacaaactttcaggtaagttatacttttgtcagattatacttttatagatggtagactcaaccttaaaaaaaacgcgtatgacaaataaaggatcagactttgtttttctacaattgttatttacacaccaattttaacaagtatactttacatttgtatttttttaaaaaaatatccattttttctcataaagtaatttcctaaagtgttcaaacttcaacacatttcaaaaagttgtttacagaagccattttcaaaaaaaaagaacagggggacgaagagggaggattggagcagtggaagcggttggtggaagaattcatgcttgttgtgagaggaagggttcaagaggtgaagagggtgacgttgtctactatgttggagatgcagaagtggtcgttgcagtaacctaggatcatgaaggggtgggtgagcttgagggttttgtcgagggcttggagattcctattcatgcaacttcttccacattctaataatttcaattttttttatcagggtttcttttgaagaaatcaagaaagtgatagtataacacacaacaaacgaaaagcaaccaaaagacaattggtgtcctgttttttttatttatttataaatattgacttccagaaactattttccaaaatatgttaaaattttaacacttcccagaactcctttccagacaaggatatttaaaaaaaatataaataagttatattagcaaatatgagaggtataaataataattaccttgcatttttaatgaaggtgaaattcaggctcagtatgtcaagacctgaacttccatttttttttttttttgaaagttaaatccattaggatattaatgcttcagttgttctcttctttaatatttttttttatttaatttgtcttattttttctttttctttctctctttatcttatttttgatttattattgaattcatctatcaccaatctcaattaatttggattaaaagtgttattgtgttaagtgttactgagttgatgttgatattgtcttgaacaaaaagcctgaggacaatctaatttgtattatcattagaactcaaaatagcatcaacctccaacaaggaggttacaacaaaaaattgaaacatggttatcgaaacaaacatctttttctaaagataaaccagtcttggcaaaggaatctgccatgcatactattagcttccctcaagatatgcaatatcacacagtgcttgaaagtattttttaaatttcgaatcataaaggagctcccataactgatttgcatgttgacaatcgtcctccaagagtctaaatgcctccatacagtcagtttccaacagaactttaggaatcccttggtcactagcctgtctagccatatgcataccatacccaattgtgcacagttcagcttcttgaatggaacaatgtccaagcctcctaccaaaaagcttggataaagtccccatcgctgctacgaatcacagctccacacgatgcaatttgtgttactcgacaatattttcactccttgacactattaagtattatctactcatgagataaatttaatcactactattaaacatttcaataaattcatgaaactattaattacatattaataattgataattatatgtatttgtattcattttttttactatatattattactacaaaatatatagggattttattgatgattaatatgttaaaatatttatcgtagattaatatcaatcaataattaatacattatctctcctagtatcatcaatccacaattaaatatatgataatcatcatatgtagattactatcgtcaagccacattcatgggaatgaatgtgaattcagatatgtatcgatgttctataatttttcatcataatcttcgttggaaacttgattgattaccttagtgagattttttttctttcaatccgagactttacttaaaggaatcaagtccaatatcaccttaattaacaacttgttggtaggcaaaaaaatcaaataaatacaaattaaataaaaaattaccaatttagggtagtttcgaaactatttaccaatctggggctgttggtcacgtccagaactgggcataactggtcacgctcagaactgggcatgactggtcacgcccagaaccaggcacgactaggggggtagtcacgtctggttctgggcgtgaccaatcatgcctagttctgggcgtgacctacttctaccacgtgtcatgcacaaatgaaccgatgcgtatataaactttggacggtcataacttttgactggaatgtccaattgaggtgtagtttgtgtcaaaacgctcgaaattgagaggagaagccctgggcaaattttcgaaggggatttggtcaaaacaattttccaaaaaatatttctaagtgcctcaaaattataatttaattttcgaacatctaaaaatttttttgttttctagatgttaggttcataggaaattgttaatgtgtatgttggtttaatgtgtagtgtttacggtttagggtttgggttaaacaggtagggtttatggatttcagtttagttttagggtttagtgtgactaccccctagtcgcgcctggttctgggcgtgaccaatagtcccagattggtaaatagtttcgaaactgccctaaattggtaattttttatttaatttgtatttatttagtttttttgcccttgttggtgtattcatttacttttaatcacttttgacacaaaattaaccatgtttatacaagtaagcgggtgaaaaaatgttagcaacaagataataggtgagtttgtttaagtttatttttaaagaaattattttaataaaataaacaattttatacttttctaatgtatttgtcttttattttatttctttaagaaccaaatcatatatatttattgaaaaaatatttttttaaaatacttattttataaggtatttttttaagtttaaataaatttacccaaaaaatgagtgcttggagagagaatcagtagacactaaaaatgagtgcttaagagaataaaaaaaacaaaaagctgaaagaaagacaatagtaactacagtgaacaggacaaaagattcgtttgaaatggattgggtgagcggtgaacaaggaagacggtaaaatcaagggacggtggcttacagtgcaacatgagatcatcaaacacacactttgttcattcatttttctctttctttcttatttgtatttttgtgtttgtgttgtgttggttgttgggtagtaggataggacttaggagagtgggcactgttatgtgagtctcaaaaagcaaagagtggcactgcacttttaggctgtaatctgagacattcaatcctatctttcaaaaacccatcatccatacaaattacaagacacataattcagggtccactatcacattaaaattttaaaaaagtgacatacataggtaaggttaaaaattgaatgactataaaagttcgacatagttggtgttcactgctttttcttctttttttttcttttttttcccgtggatcatttcaaagctctctacttttttgtgacacggatcccttgctgggttcaagttcctcactttggattctcttccaaatgggttcctctgatcgattgtttaaccggcaaagaagtcttcatgagatccttggtggtggtcaaggcatgccattatttcttcttcttcttatcattagttttgattaaatttctgagctttattgatgatttgtttgatctgtatatcacaatcttttattttaatttccttggtgttgtttgtttatgttcattttggtactgtttttaacagtggaatagctatatgggctgcgcctgtgcttgtttgttttagttttttatttgcttttagtaccaatcggaaatgggtcagaatcagaagaaaagaatgaattggtaattgatcatgatctttgaatctttgctgaatcaatgccatgcttcaatgcagttgcagatttaatactgtggaggcggaagaaccttactgtggggatattgttggtcacactagctgtttgggttgtgtttgaaagatctagttatactcttctgtctcttgtttctaatgttctcctcctcctcattgtcattctttttctctgggccaaatcagctgcaattctcaacaggtaatacattagactaattagattattttgtatacacttgagttggatcttcttgtgtgttctattttgaattctgaaacgtattagaatgtcgaagcttttatagatcattgatacttcaaattcagattgtttgttctaatatgaaattgttgtctttatagtattcttttaaaattatatggtccaaggctatttgtttgaaagataaatactggcatgattaagtggttgaaattttgtaacatgtatattgtaacttagctactgtagttttaagtatgaagaattgtttgaaaacttgatgctctgtgcactatggtaatatatgtttgttactttgtttagactaaaatgtgcataacactttgtctgtgttaatgttcaggatttacttttcttgtacattggagggacaacagtttatctgcagttgtgaatgtgcctattgaaaactaattatcattaatcattcttgagagccctgagttttggccctgctcttgagggagattttgtgataatttgattcattaaatctacatttacagttgcaagttttgatccaataagatgcttttgttggagaagcttgtttctgctgtatatttgttgcatgttttgaagctgagtgatggaaggtacatcaaactttgatcagtgctctgatgaaattgagccttgtcctcagtgttgacacacctgtttgtaatgcagaggatgtgatgcctactctttaagtgtcctgatcttacatccatttatttacagttcgtttttggtgctgaagagggatagttaccgtatttgtatctcaatacctatatagagaaaatattccttaaagtccagttaaaatacattggctccacgtggatgagttgtcttgatggaaatatgtaatatagtgtatcatttcaaagtctaggttggtctgttaatcattatgctttaaattgttgcttcttgattgataccttcccttgaataacatgttgtagtttagacacctcacagtattcatcattcttaacatgccatcatgtttagtaatttgcatctataaattttcagtagtggttaatggtttatggtgtatcaataaaatgtataaaaacaagttaacggttttttttttttttttttctttttcttttgacagacctgctccacctctaccacagttgcatctctcagaggaaatggcaaacgaagtgaagacttttatccgcacaagagttaatgatctgttaacagtttctcaagatattgcccttggtaaagactcaaggctgttcctgaaagtagctgcatacctctggttaatttctatcatcggtggcttaactgatttccttaccctggcatacaccagtaagtttctgagcatcatgtgatcgaaatacattcaagtcacttaatgaatttatctccagtttttgaaaattaagaagcacattgatagaaatgaatttgttttggttatgtggcaggtctttttattgttcttatagtaccagcaatctatgaaagatatgaagattacatagataagtatatcttgaagggttacagaaaattatgcctattacatgtgaaaataaatgagcaatatgtcagcaaagtccataattggatcctggagaagaaaaagctgagctgaggttgtgtttttcacattcattttcacaatttcttttattactcctctaaaatatttcttacaggatcactggtgagattgtaattgtgagtttgagggacaacaatagtgatcttctcccccccaaatgagtgtcttccttttgcattttccatcttcaatgatggatcacttttttggtacatattgatgaaactcttacgttggactggttcatgtagtccactaagtatttgagatttattcttaggttaacaaagaaaaaatataggtgccactacctatacacaagataaaatgtgtttgcaactatttttacatgtaaataatataggtacaactattattacgtagagttgtgttgattcgcatgagttattcacttcaattcaacaatttagcacaccaactaatattttttccacttctctaaaagtaacatacatggatggataagatattttagttaatttttaattttttttatgagttaaaaaatttgtttaattgtttgataaataaattttttttagtaatttttagtagtttttatcatcttttgaaacgttacttgaagtaatagtttttttttaaatgttagtttttagtttttttttaatatttttttcatttttatttttaatgtatttattcatttttcttattatcttttttaaataaatcatgattttattatttttctgttattttatattttttcaattactttaataattagtttactaaataattataatttaataaactaagttttatagcttttagttactaattttcaactttcaactattaattaacttttcatcttttatttagattttcagatagttttatctataaaattttcctttgataagtcattgcgttataaagtcatttcaatgttaaaattactgattatactttatatttatatgcctacaaatgttcactatcttctaaacgtgtgtataaattaacttctttatttttaatccgaaaaataagtaacttctcaaggatgcaccttagttctggcaagtgcatttggcatctacatctactttaacattttgtagcctggacctcagcaaagaatggaggaaaatgtaattaaaaatttgtggatgaacatcataattacattctagaatcgatctaaggcttacaatataatattttttgaaagtaatttggattttcgtaaaagcttttttcactaaacaaatgcttataatatttttcttctatcaaatattatatacttcatcccttcttaattataaaatatttttttaaaaaaatatttgttcatttttataagaccatttttttaaaaaaatttgatacattatttatttattttcttacatactcttatttaattattctatatcaaataagatgagaaataattaagtgaatagagagattttttaaaataataatataaataattaacatatttaatatgattaattaaattaattatttttctcaaagatgtgaattgggacctaagaaagtaattttttttctctcctgaacaaattttctgcatccactcgtgacacgtctattataaaaatgtgtagaaaacttggtgcagcaactctcgctaaattataacatcatatggctttcgattgcataaatttcttatgcttagagtactctctctttgttaatatatatatatatatatatatatatatatatattaattaccttatttatcaaaatttaaaaatagttaatttagtttataataataaatttgtcttaaatttataatttttacaaaactatccttataatttatacttttctgtcttctaattatttgtcaatacattatcttctctttaagttatgagtatttttagtacaaaaataattaatacaaaatattattgattaagtcttataaaataaaatcatcattattttaaatttaaaaaatttgggtgttataaataaaaacaaaaggagtattatgtttgtcacaagtgtgtgttttgacttttttttttataatttacgtaataataaattttgacccgtatattacggcataaaattattttcaattctatttaattaaaatatattttgttttaatatattgcaaattattagaaagtaaaataaataatctaataaatctttgaaaaagtatgcgacttttgcaagatttactatgtgtaaatattgttagagaaatcaatcacgtgtttgtaaaattattgatcaatgagacaaaagttttatattgtaataattacaagtataaattacatagaccttattttaaacaattaatggttattatacaatacaatcgatggcttcttacttgataaataaaaaagaataagaaatgttgatatcatatgtgagtttatattcagcaaaagaaaaaatattagtcaatagaaagtaaaaataaataaaagatagaactagtttgtggcacaacaattaaaattcaattcacgtattatatgcaataaaagattatatggcagaaatactattctattgtgacaagaaaatattaatttacttgtcaacgcctaaattcaggtttaaaaatttctacagtataactagattttgttattatataaaacaagtttaaatattaccttgtttttttgccttgaataagagaccatgagtcagatatcaatcccactcacaattcatggctaccgttgatcaatttttttttacatacattaatttaaatattatcttatcttttagttgttcaattatttttaatatatcaattatgtgtaaaagttcatacaaatccctgattttgctataaaatatttaaaatataaaaatgacatcttaaacacattactttaaaaaaaatataaaaatgcctaactacttttgaacaatttgttttttttctacgagttatcattacttcataatgagttttgggtaatcgaaagattataattattattttttattaataaacaattgggctatcttgttgttgaggaggtattcagcaaaaagaaaaaaaaatcttgtggaggaggtttcatcttcaattattgaattaatcatatcataaggtcgtattaaaacattgttcaattaacttgtaatcatatgactgttagtgggtgcattgattattatttgttagctcccggtgatagttatgcatattggttaaccttcaatcctgagtgtttttttttgctaagctcgacacaatacaattcaaagattgctaacagtaatagaatggaaacacagtaaactctactcttctttagaaaggtttatacatgatttggaatgccgcatgtaattcctaaacgacaaaaaatacgctatttatacaatattcattataaaataatacattgacttttcttcgtaatatatagtaattaaatcgacaaaaaataatatcaatatcaattcctgttaatgaggcatttcttgttgaagtagacgtattttcaagaggcacagtggaagatgatggtgccacaaagggttgatttgaaaagtactattattgtcaccatttatgaaacatcgatggataacaaatttgatagaatattgattcatatagtaatgccgggaaaaatggtccatagacttgtacttgagagtaaaaaatgttttgattttcaaagacactaatcaatttccatcggacaaaaagatttgagtaaagggtatctccaaaaattaatttagattcttaattttctaagcaaccatatattttttttatataaatagattttataaaaaaaaaaatctgtaaaaactcatttgctccaatattttttttcaagttgcttaactttaagaaccaccccaattaaatttgctctaatatattgccttgcaaacagtcaagagttgatgcatcaattgcgtgattttggatacttactataatagccaccattataagacaaatggtcttgatcaagggctatgttgtgtttaaatttataaatgaataaaacattggttttgaggcttgaaccccagccaaatttgaaacgaatctcatgacatgtccaagctcggttcataataaagtttaaagagaattacatgaaaactgcaatgcaatcccacagaatatatggcaattgctaaaagctagtttatatgaataacattctcattttactatcaattttttcctccctaaaaaatgtttgaccacatcctggttagcagaatgaagagaaagggacctttattttctacaatttccactgcatttgcagttgcaaccagtccccttagaaaattctcaacggtaactcagctcaggacgactctaaacttttgacgaactttttagtctgtcaaaaaaaaaaaaaaaaaagatacaagtgagcaagtaaacacaaattcaaagtttagaagttaaatgagttttgggagtgcaagaaaagaaacaataaactctcatgcttgaaattggcctaatttggattaacttctagctaatgagaaattttcaattgaaatatatatatatatatatatatatatatatatataattttttttcttctatgaatgctattttaacatctaagcatgctgatattaaatatagaaatactgcttttgtaaatgaggttttttcatctctacccaaacaagcatgcaaagcaataaaaataaattaagaatccatgacagaggattaccacagaaaagaaaggtaatggaaatgtagcagagtattcaaaatatacctgttctaaggttagaaacatgatcacattccaagatcccagccgtccaaaatttgggaggaaccctttataaaaggctaagggtccctggaaaatacatcagattacatacgcaaatcaattttgataaaggatacatatttacaatataactccttgtttgacaatttaaggctaaaacgtagagaaaagaaatttgagatttgagaatgtaaatatatgtcagataactataagtgaaaaggcaagtttgttcatcctcaatgtttgtggattataccctctgcttacagttagatgtgatgaaatgctgtgaagaattttatttaccatcgcaacaacaaagggtccacacagttaatggttgtaacttgttgtaactaaagcaaaatgatggtagatgttcttaagagagcaaaaaagtaacagtggaaagcaacttacatcattcttcaatgttttgataaaacaatcaagggtgttcttgtaactagaatctcccatcattctcgacttaacctgcatatacaccagaatgaagatataacaacagaattagaggaatgatagaactgcacaaacaagaagttcagttgatcaccttgcaaccaaataaaaaaattgaaaaaaaaaattatacacaagtacaaagtttatcattaattgtagcattttctaaccatcctggaattcttaattgatcatggtggaacagggaatatcaagtgtgaaattcatatcatattgaaacaattatttattagcgcactacatataaaacgctgaggcaataagaaagaaaaatcaacaatggatattcattagtattctaaaacattaccacatcaactggggagccaatacagacggcgaaaaaccctgccccaagaccagcaagaagatgagttacaacgttgtcagtgaatcctggaattttcaaaatagtctgcacaaaaaaagacataagttatttacaaatataaaggagaaatgtttgctccacaatgctagcctccagtcacttttaaatcacctgtttcacttgatcatagctggctaattcagcagcgttgatgataccatttcttgctatattggggccaagcccagtccaaagagccccaactccttcctgtgtgttagatcgatgtatgttagaataaaaataatcacaaactaaaatgaaccaaatatgtttttctcttccataaattatattggattgcacagacctgtctcacaattgttgaataagcatttaaagatccagagtagcgcctgggaacaccaggaggtaattttccttcagcttgaagtctaactttgacaagatcggttggatttgccaccgcaattgcaaaagcacctgttgacaagacaaattgaatgagtttgtgattgagttattgcgatgagtatttagataggaataacacaaaacccccctaagaaaaagtaaataatccatagattaggaaagaaactcgtataatagcacatatatacaaattattcccacaatttccagcattgagatttaccagttgtaaatgcagcaagaattttctttgacaatggaacatctccaacatggtctttccccacatagaaagtcttaacctgttaacaacccatgttatttacaacattagataacacatgcaaacagtatatataaactaaaataaatgaacaaatttcagcaacatgattcaaaactcacaggttcatataacccaattcttaagcctccatacaaacattgacgatgtaaccctggcacaatgcccttccagagtgctgaaagaccttcttccctggcaatggttccaaccgttcccagcatacccttatatttaggtaaggagacaacatcaccagctacagcttgcttttgaagctgaagcctcactttggcagtatccaaaggaatagtacacacctatttcaattacaagagctctaataacaaatccggggaaataactgtaattgagtactttgtaaagcagtagagaactaacaagtgaacaggacacgagatatgcactaagaaatcagtcacaaatatataacaagccaaatcaatctcaggacaaaaatcaacaatgtaaagcatactatcaccatgtaaacctccaatgatgcaaaacctgtttcacatacaagataacctggaagagtattcaatttatcaagtatgtaagtaattgttttgtgctaccaaagttcgaatgcataacagctagatctgcatactgtatttggattacaggttagaaggagtggggtagagaatgggaacaaggaaaacagaaacaagttctttctttgggagattaaaaataaataggaaaagaaacaaattcaagaggtggaatagaggaaactcaaggttaatggaggtccattccatttggttactaatcattcaaacggggaaaatagcattgttccattccttttcttcccttttctgctcattcccactcatggatttggttacaacatgggttcaaatccctctcactaacaaataactaacattttccgataaaaaaaaaaacattaataacaaaacatccagtgtctataactgcttccaagtcaaccattttttcaggacatacaagtcatcaacgagggaacactcctcatccatgttaatccttgaaaaagaacagcaaggtacgcatgcctttcatcatgtaacagcagtcaaaatccaccgtgaccaccattaactaacaaagactattaatagaaagggataaattaaactcaattgcaaagaaagaagttcttgttttgttttttcagcacaactctaaattttatgaacattacagaacacaacataaaaccataacgcataaaacaaaagatccatataatacatctaacaaagactgtccctgtgttcggtttagcagtggagggagacatctacatgcatgtttggtgatgtctaacatgattttgccaggaaaaaaaaaaaacaaattatgttgggttgtttccaaccacacttaagtttgctccaaaacacaagtctgactacaagtgaaaaaatatagctttgcattgaattaacaatacaaacttattttttgagatgatcatttcgaaaacacaaatcacttcaaactcacatttaaccaaaactcaatttcacaaaatcaatattatccaaaataaagtttgcaaattgaagcccacccacttgaaattatatatcactaaacacagttagaccatcgacaccattccactttcaactgaaactcgagtccacaaaaacattgacttgataatcaaagttagtactctaccatcaaccatggtttgttccacaacaaaacaaaaaacactcagaactaagaaacccaccatagtgatacaacaaataagatccattgctactaacaactacataacagcaacataaaggatgggtcttttcacaagatcatgaaaagagagagaatccccagaaacaaaaaacgaaaaaaaaaaaaaagaaaaagaaaacccagatagcgttttgcaaatgacctcagcgaaacatgcagagaaagcactgctggcaaagatttttccgaaggagaggtcggaattggacttagaatctgccaccatggtgagtgttgggaaaggaacaaaggttgcgtgttcaagtttgagtccttcccttcttcttcccttgatccccttttgaaatactcaagctaagctcagtagtttctctgtctggaaatcggaaatgtattgttattggtttttggtttctgaatactcatttattgtctggtaaaatttccttggttggcacggtccacttgctttgctagaatgcaatggatgttgcacactagcacggtttccttaattcctctttaatgtttcgcataattgcattgcatcactctaatgactaggataaggtgagttcgaaatttgataaataatttctttttaatcttccgattcatcgattttttttttaactaatcctaaagtctggctaagacttgataagatcatgctaatatgtagaatttgtcaagggtttaatactttaattggattaatagttttgtattaattattagatgtaacgtaattaatatatattaattaattttatagcaaatttattttaactttgatttctatatattatcaatgtaaaaccagaaattgtgttaaatatttaaaaaagaatttgtcctccataataattttacaagatttaaatgaaattattttccatgataatatgtgtgatctaaaataggagaacgtttgtttcacaaactaaattataatatttttggactattgttggaaatattattttcattaaaatgttttgtaactacttaacatttcttaaaaaaaaactacttaaaatttcttgaaatatcttagaatttattttaattaaataaaaataaaaataaaagtggaaagttattttagaaaataactcctgttcacatgaaaatagaagattttcactcttttacatatataataaaaaagaaataaatcatgtgtaatatttattcttagaatagatcatatctaggagtaatttttttttataacagcttgcatcaaatataagaatgatacatttccaactcagtctagggaatagatctggatatgacttggaacaaacacacttaaaggtggtgtaaaatagttattataaaaattaataaattaataaatatattaatttatgattttttaatgcatggaacatatcaatttatgattgaataatgtaagttttgtttatattgttagtatatggattatgtgttcttttactttttataatggatttgctcttttactttaaaacttgcattgcaatataataaattaactataaacaaatatttagtaagcgaatactaaaccattacgcaagtgatgcgtgtaacttttgagtagcattagttgccctcgcctcttttgtttgacctgcatagctttcgtgtgtaaaagaacgctttcgcagtctcacgtatctttgttatgcaattcatttcagtattaggagacacaagtaaagcgttggtatacaaaattttcagcgaatcaaccataacgagacaatgaatattacacacgtatggttaatgttacatgtgttacatgcactgtgtacctaacattattattgtctaccaagtaccaattgatataattagtagacagtttgatcttaaatatgttaataagaatctattcctgtttgcaaaaggataaaatgcatatatctcttttttttttaaaaaaatgtattttataaatgcttcttaccaattaaaaaaaagttaaagaaatctagaagttgagtttgttaaacattctaattaggtttcaaatttgattgtatatgtaaacaaattataaaaaaatatctctatttttaaataatagtatttctattttttaaattgattattagtttttctcttaccagaaattaatcgttagttgttagtcagagaatactcttaaattaacacacaaaattacaagaaaaataaaactgtcaagttataaaaggaattttgtatagaatactttaggatattaagttaaaaaataaaaaagcattgactaaaaatatgtataataagaaaaattaatatttaagagttgaagacatttttttatttaaagaaattaaacataatatcagaaaatttactatcctcacatattttatttaactaactgaattatatgccttggtgagttgaagacatttaataagacatgcatattaaattcatttatataaattcatctaatccataatcactttaatataaatgaatttaatatttcttattaaatgcagtcaacttctaaatattaatttttcttatagataacacactctaataagtttagtttatggtagaggatttgaatacgattactacaaaatatatctttaaaaaaagacaaaaaaataaaataagtattaagtacgactcggccctagacataaaatttagttccttcttttcagtttgatcgctctccaaaggctcaagctcagtacctctgtcaggaaatgtgttttttagattttggtagtgctatttgattcctgaattctcaattattattttgcaaaatttccttaggttgccacgttcaacttgggagaatacaatgcatgttgcacggtttcgttttttaaagttttgcataattgcatcaatgcatctgtctatctaataactcagtaggctgaatcagggtgagttggaattttgataagaccatccataatctatagagtatgtttgtttgacgaattaaaaatgtattttcgagaatgtacacagaaagtaatattcccaagttggttataagtttttttcaaaaaaaaaattaatattagaattttcttttttttaatatgttttcctctatttcaattctcatgaggagggatgaataagtggtattttcatgatgagaatatgagaaaattattattgtctaatatacatgtaacttttatttgtatttattttattttaattttgaaaaactattcctagaaatattaaaatgcaattaaacatttttaaaaaaaatacctaggaatattattcccatattatttttctgagaataatatatttggaaataaaaaaagattttgtgaaacaagtatctttatatagtattttatatagtatttttatttatcttgggtcatagatcacaaatatctcccaacacaatttcacttactgtacctaattatcattgatccaataaaattttacacaaataagaatcatacatgaatttttgagttaaatagatcattctcgtttatatgaatacaaagtaaccttaacattatcttatatcactttatcaatcatttaagtcattgtcttcgtagtatttaccaagggtttatagttaatataattaatgattagatataatttcaaatgacaaggttgtgtgtaggctttttacctatttctttatagaaatcaaataagtgagatcttataaaaattaaacataggtttaaagaattaataattataaaaaaaaattattaaaaattacatcagagtgcattaacaacactttttaataaaatatttttttttcaaaatagttaacatttgtctaacggataaaaaagttaacatttgcctaaaatttaataaggacaaatataaatgtaaaagcttgcatgtcatgtactacacatgaaaggatcctctatgtctaaattattggagttccttttctaaatgttatgaaaaagaaattgcagtgattgaaggagccgaaagcaaagccaataaaaaatgactgattaggcaataggcatgaagctcaagtccacatcaaagggtttatggggagtgtgactactcccaaaatgcttgcaatgaatgaaatagttaggggggaaaatattattgttcacgtgtaacaaaagtggttgctgcaagctcataattttatatgcataagaataacttgttggccctctcgctggtggtaaatcacaccctgctttgattggtaatcttgttaattttactaatttttgctatacctctttttgatttcactgtacaagataactccaatgacagtgagtgcatagccaagcattcctatcattgagatggggtttttgaatatcaaaattgagaccaccacagcaactgccccctttgcatttcctaaaacctgaaaagatttaacaaatggcattcagattttataccatatcttatatatttagtggttcatttacaaaaccttattctactaaacaagattgactacatgaatcacatacctcggctacatgaatcatatgatgctattctacacgattaaaaattaaagtttcagaaatattattcaaataccaagaaaagtggaaattaaattctagtggttcattcaaataccaaggaaacgtttactattccatggatgttagaatagaaacatcattcaatggaacatcttgagaataatgctcaacaaatgtttgcattttatttttcgctttttagaatttagtatgtgaaatgcaggcagcatgttgaaatgagtccttaatctgtcgagttatttccatatgaaaaatgacaaatgttagtaagccttaaacaagaattggatttatggtgtttgaatatacctgaagggtaagtgcacttgtatgtttggtcaccaaaaaattagtgaggttcacaaaatatgcaagagaaccgagaagctaccaaaaaattctgatatcctttctggcaagatccattgtgatctgaatcacatttccctccatcaacaatattgcatgaagtaagaccatcactgctattggagccatataaagcagcaggttcatagaattcaacttttctctgaaaaccatcaaagtaattttatgttggtttactagtgtagagaactatatagcacctagtgcaattcagaacctacaagttctttaattcaatcatcttgctaccataaggaaaaagcagaaggaatccttactcctctgaggacaacaaaatatcttgaagcactgatttaaatgctcgggcaccagtcgatgaaacacagattataaatccaaacagatgaaaactcggttcaccctgcaggataagtgttaatgtcacatgtgagattgggagaaaacaaattgattcttggagagattaaaacaagtaaagctagcaattgttttgataggatggttaaaaagaacattcgaataaagaaataagaagaaaaaaggtggcttaaagaaattgaagtaggaaaaaaggactaaatgtggactctcacatataaaacaagacatgttcttatgctaattgattcttcacaaatggctactcaatttcaccctaattaattgcaccgtcttctggactagttgcccgtttgtttcacacttttgatagaattgaatcaattgatgatgatagtgttagatttctaaaaccaattggcatttgtatttatatatgagaattctccagcaggagaacacactgttttgtcctgatcctctgagtttaacagatagaactaattttatgctgttcaatgttaaagaaatgtatgctcagattaatctcatctacagcttttacattgtaatgtgtgcagtgtgaaaatctgattttgattataaaacaaacaggccctaatatcttttttcctagcgaaaccaaacacattaagctacagctaatcttgcttaactagcattatcaacaatatgctttgatttcttaacttcccctccaactttgtatagccaattagccaagtcttggggctatctctatatgtcatgagggaatgttcagaagtttctcattttgatcacactgcttatgcacacagattcatagacagggtgattcaaataagctctgttctgacaaggccacgtactgaaatgaaataactctttagtatctaaacttatcaaaaaaaaaaatgtcaagaatgaagttcacatggtaacattgtttattgccaataaattggtgcaatatttgttgacttccaattccaaccctaaaggactgcatagaagcttaaaaaaagaagggaaaaaaaaattgataacgagttttgcgatgctagctggagaaataaaaaatttaaggatttaagtagccttatattttggctcaatatttaaatagtttgaaatagttgaatgagattgatcaagaaaaaaagagaaagttttctcaccaaaaccccttaaatttccgaaaatctctcttaatttaggcatatatgtattaacaaaaaaacatggaaattttcacttgtttttattccaatttaaagttactcatcttttaataaaaatgtgtacaaaattttcttgaaacaataattgacagtcatgtgcacaatgaattagagaatacccatcatctcttaatcgggacaaaaaaaatgtaatatcattccttagatcaaaatgtaaacttttttcaccacttttgtaaatttttaccattgattcaaaatccaaaataaataaataaataaataataaaaattgaaggttaaaatgagatataaaatagattgaatggttaaaaaagagagagaaataagattgattttttctatggacagaattaatattttaacaaaataatatttattaattattgataaaaaaattaagatgaaaattgtttaccccactagctatgacgacgcccgcaacaatgggcaagagcatggcgtaacccacgcctccctcttgccgctgacagcataagcgaaaacggcggtgaagaacggcgtggtggcgccgatggcctggttaaacgacacgggcctagttaaactactactagtattataaaacaaggcaaaaaattaaatttaatataatttaaataaaaaatttaaaaaatggtgcaaaaaaatggtgcagtgcaacacgcccatttgaggcgtgtttaaacacgcccaaatggggcgtgtttgtgctccttttgacacgtggcagcaaatataagggggtgtgggattttcgcaattttttcgtaaattatggaaagtcataacttttgactgggacgtccgattgacgcgaaaccagtggtcacgcgctcgaaatcgagaggagaagggcctaggcaagttgtttaaacacgccccaagtgggcgtgttgcactgcaccattttgccaattatttgggccatttgcaccattttttaaattttttatttaaattgtattaaatttaattttttgccataaaacaataatactagtagtagtaattagataccacatttaaaaaaatatagttaactagatacacatcttgtatactgtatagtgattttttttttctttcaaaagatgtagtagtacgttattaaatctttcgaaaactataaagggtcatttttaaagtggatgtaagttgatgcaagttaaagtgaatgtaagtttggataaattcaaaattataattatgatttttttaaatcaattatatatataactgaatataggtaccacatcttgtacattgtacaatatttttttaataaaaaaagtagtaataattaaatctttgaaaaacttgtcttaatctgtatatggaacaaatacgaattttattacatattgtaatgcaagttaaattaagttactaccatatatctgaaattctgaattctcaaggagtcacaactcacaaacactagaaatgggtccgtccttggagaacaaaggaacactttggctaataccaattccaactagaatctgacaagtaaatgacgttaattaaattgccagcctagcatgttgaagttaatcacaagaaacatttggctgaatctatgtttgctggcagggtttcagctttaacacacagaagagtactgatatatagatactaacaataacatcttaatttcattttttttttttcagatcatgtcttttattatatttatcccttctctctttattgtttctttttcttttcttggtatagacacctgctggctgcccaacaaacgttttcctatccagaacttagtgcatgcatatttattttattattgtaaacaattttttgggacttacaaaagcatccaaattatttttttacaaaattgagatcgtgaaccattaaatttatcttgaaatttgtgtactgtattttgatcggaaatctaaacatatttattatttattatttttgtttaattgttaaataaataattattcatgtaattttgagttgaaacctgagagacatggtcaagtgaaatagccttatgcaacttcaatttccacattaaaagaaaatttttctcgttgtatttgtgtcgtaaaaggcacgctgtgtagtagtggttgttagcttgtccactagttcgtgcttatatgcatgttacagtttggaatttcttgtattgaattagagatagatattttgcttgttaagttttagagattataagtgaagtttggaattaagctttacacattatctaaaaatatttaaacagtataaaatattattaaaaaatatcatctaattttggttgaaattaaaaaaatattaatatttattatttgaattgatacttaatagtttgattaattttatattaaattatttttaaaatttaattcgaaacatttttgtatcatcatatcttttcttttaatttaaattatttcaaaaatatattaagtcatttacctagataaatttcatttttaactttattatggtttattttattttaaattaaataagtttcaaaaataaatttttaattaaatatatattttccgtacataaatgtcatagtaaatgaaaatttatcacaataaataaataaataaatattatttcgtgattaaatttcaatcaaatattcacggaagaatatattttcatcaatgataatcttgtataatttttatttataaggtctaaattttagtatgataaaaaaatgtttttaattagtttattataattattttcattaaatatttttgtgaataaatgccataagaaattaaattttattaaataaataaatatttttctgtgataaaattttgatcaattattcagcaatgatatattttcatccatggtaattctttctgaattattattcatattcatacatcttttcaaacgtagttagtatatcattttttaatattgagtagatttcccctaaaatactactacgaaccatgaaacacggggttagttaaccaccactctttacctaattatcctcttattttaacttatcacaactaaaaatgaatgagattgcttttttttttttttatgaatttattcaagtaagaatttaagatatcttaaattcaaccaagacattgaacatgaggaaacagtattgatatttaattttttttaaaacaaagataaaataatgagtgaaaaagaagaccaaaaaatagaaaactttaatttccttatataaactttctcacgcaaaaattcgaaattaaagctaaggagatggtgagaattgtagaaaaatataaataataagtaaatgcaataaaaaacacaaataacatgtcatcaaagtcaaagcaaagcaagtaaattaatgaggtactaattgatatatgacactgcaattaggtgcctaaaacaaagaaaaacagaatgtaaaaagaaaaactactgattaaactaattaatcatgaaatagtacattgaaaaatctctatctttctttaaatcatttcaactttcttcttctatcactcatcaagatgtatattatttgtctttagtgaaggactcttcaggatactggtgttttttacaaatcaagatgtatttttttctttcagttggttatttaatttcattgtgattctatcgaggaatatatatcttagtataattcacaatgcatttaaaaaaaatcattttttaagggagttgcacatacctctcatttatgtgcttgcttcttctttacttctaggcaatgtctttgcgttttttcaggggtcaggaggataaggaaaaaattagagaaagatacttctgaaagtcattattatctctcttaattagttctatacaattttagctacctaaaagacttacctttaaccatcttagttaaaaaagtggatatttttcataacaatgaaaatgaatcattaaaatattagaaactatgcttctattatttgtcaaactcctgctctttaataacatggatttggattctaataaatatctaaagaaaaattatacttgtacaacaaaatatacaactaagagaaacaaagagaaaaaatgaagataaatttgaatttgaaatataataaataataaaatgaaggaaagggatagacacaaaatataatgttgtataaattattgtagtgtatcatttttctattttttttctttaataaatatcgcaaattgcaattgtaaaatataatgattcaaaaatgtatcttttccattttttgtttgtgtacaatccagctactttatccaattgtaaagtgtacctttaacataaatcaattaatcacataaaaattgttttaacaaaatcagtttattgttatgttcaaattagggaaggataaggagacatgttattgatcctaaaagagttgacgacaaattttcaaaaacataaaaataagaggcataaaagaacagtggaaaacaaaacgggtcttattcttgattggtagattttaaaaaattttaaaaaatcatatctagaacagtggaaaataaattcgtgattggtggattttaaaaaaatggatagttaattaaagagaagcaatggattacaaatttggtttattgtaattaaaaaaataaaaataaaaattcgattagtaattagttagttaaaagtaattagagataagtaattggtttattataaattcaaaaaaattaatgacactcaccaacatcgacattaatcattcaaagtttcaagtatcaacaaaatcaattgcaaattcaaattcaattccatttcctacgtttgttcttcttcctctctctcatccacccatggacataagccaaatttaccccgtctcataataaattggagacaagatatcatccttcaaccgtcactcttgaaattttactaagtaatcatttgaaactttatacagagtaaaaaagaatcagtgaagataaaataaaatagtccccgcctgaagaccatcgtcttttatttcaattatgacctttttcacgctgcttgcaaaaatttctacatcatgactcgagttcgaatcacacatgaaatcaccatctacaacaatggtttggagattaatttaatagccaaaaaattaattaaaaatcattacaaaaaaataataaaaaagttgattgaaattatgtgattcaaattattgaatgtatgaaattaataatggtacgtgaatacttcatgatattataatcccttgatgaatgattttatattcattgatgattatatatttcagatccattgatgaatggtttcaaacatataatcatcaatgggtctcaaacatcttgttctgtaagtttcccagaacacaaatgtataacaccgaagtgctacgtgtttgatgttggatcactctaactctgaaacttcaaggatatcaatgaagactgatacctcaaagcagacgatcacagagatacacgaatttggggtggggtgtgtgctctgtgtaattgagagagagagagagttagagtctgtgtgtacctttcaccagcaaacagtctgtatttatagatgcaatacctggccgttagctctctgaaccgtgcacgaacggcttcctatattctcggtctcaatctgcacgttcgtaaccgcttgagcggactgagtcttggtccacgttctgccactcacattaacgtttattatactgaattgggccttaacatcaagcccaatcaccactccagaacagttgccccccagctcggttgccgagtacacttggtaaccggggtgccttcagtaatgttaccattgttgagacaataatcattccgactacaattgcctgctttgtcatacaagatatagaacggatacgattctccggccacgttcatccgggtacactttgttcggatgctttgtgaacgaacctacgtagtcatgccctgctcggtcaacattcgggatcggggtcacttaactgtccgaaaaaggaaacattaccgaccacactccttcggaggattgtgtccggattttcgtgtggaacgtggtcaaccatgattcacctgggcagccatccttggaataactgccctcagatatttatcccgtgggtctggagaggccattgggcttccgccctcgcaacggttactattctatatcattaaagataatcaatgcatttaaagcacctgtcacctcattcgtctggtaatgattgttgctgttataattttacttttttgtcccttgcaagtgatcgtgtttttactttgatacccctgtgtcgtttcgttttggcagctgagtcgtttcttttcttttggcggttaccgcaagttatcattacatttcaaatttttattttcaaagctagtgaccttgcatactcttcttcgcgcttgtcatttctgcttattctctccttgtcatttcctcttctctctctcaatattctttcgagtgttccttcgcgccttctgcaaattcttcctacgttcatcttccattcaaccttcaatcccttgttgctaccaggttggtaccttcttctcttctctttctgcatcgtttattatttttgcattagtgtgattctgccgatatcagtatctttagggttgggtcgcatttcctttctggtttcttctggatttctgggttttcctcttcgtgttttgtactcatactgttccccttcgagtctttcccgattattttgtctacttccccttcaagtctttcttgactgttgtggatttgccctaaaaatgtcccctgaggaagaggcggaaatacagaagaaatttggccctagggccgcttagctgttgtttggccttccccttccgacaggggaaagtgaaaacgatcccctgcgccgccataccggtggctcttcctcctccggactccgaaaaatcaccacccctcctggtggttcagtcccttcgtctctcccacttcctccggttcctgaggatcctaatccaaaacccctaggcccaatagtatcaggtccaatttcctccaggactttgtcttctatgggcccttctcctcttgggcccaatgttgatattggtgacccccaaaatctttccttagtaatctctagtcgtcatcctggccctccggttagcccccctccttcttccgaggaggaatcgtcttcgtcctcggttgaagtgatggatgttgagtacgaggcatgcatgggttgtgtatctgaggccattcattttgttcaaatagggtccgacgacattgcagattcaatctttaggtcgtgtcgccataaccctgttttgcgtcctgcttccaaggacttgcaacctgggcggcatactcgtgctgtcgtcggaggggtttcggcctcgctttcttgtgattttgattcattgcctccaggtacgttttgctaacttattttcctactttattttcgtaggtataatgggtgttacttcagaaactgtggacgagtctgcttctgtcgagtctcaatccgaggttcccccagcactagcgtctaggttcccctgggttacttatgaaatcctccgcacctcttccgtcctcgatctacatagtatagtgtcgatcccggtggggaggcaggatgggttcgtccttcaggctcccttgcccgacgagccgttttgtgctcaacgggagggtaacaatcctaattttttcttcttttttcaagatgtcgtaactcagataggtattacctttcccttttcttcctttgagattgaggttttgaatcatctccgggtagccccttcccagctacatccgaacagttggggctttattcgtactttcgaattattctgtgcggacttaaaaattccctgcacagttcctcttttcttctattattactctccccatacccccaggacgggtaaggagccttctgatcggaagggctggatttccttccgtagtcagagtaagaggaaactctttgatcccttttcggattccttccggggcttcaaagacaagtacttcaaggttgctgcgtcaccccatagtcaacccttcttcttgtccggacccgagtcgtccgatgtggaatgggtctttcctttgtactggtcggatgatcattacaaacaggatcattccaactatcgttttgtcgaggaggaactgtccgactcggacgcctcctctgtttttgtcatatctgaatttgtaggcactcatggtcagcctaagacttccgattacatcggcagtggacatcgaactggtctgctttggtaactacattttcttggttcagacttgtgtttgtattaatcttgtaatgttttctgattgtagccggaatgggatcccgacctcctcccaaagccaagaccgacaccgcccgccttcccaagccgaccgaggtcaggggcaaaggcaaaaggcaggccaccgacaaccttggcggcgcgtctaaaaaacgtggtcccccttcctatagggcgttttttgacgaaggccctcaagttgtggcgttggacgcaccgtcggccccacagcctccttcctccacgacattgaacccggtcacggtgatcgacacagtggatcttaccgtggccggaggccagccccgctcgactcctccttccgactccgaggacctccagacgcgggtacgttcggataatttatggaagaagggggtcactgaagaactgatccgattgaccaggcctcctgcttatctgaccaagccgggtgccccagtgggggaggagctggccgaaatagtccggatcgaggagtatgcctaccgaagtgcctctctgggtcgggcactgacccatgttcgagaaaattatgtattcctcccataacctttttatctgtacttgttcaatggatatgtttctaagtgttcgcgccgcaggtacggggttgcgttggaggaaaagaacaaagctttggaggagaaggatagagccttgggggaaaaggataaggcctgtgcagcacttgtttccctcgaggctcaacttgcttctctccaaacgcaatcggcggcggaggttaagcttttgagggaggagctgctcaaatcccaagctgattcggcctccttgcgggtagagttggctcggtctcaaagttcccttgaagctgctgaccagaaggtggccatcctgacttcaaatcttgattctgtcaaggccgacaaagaagcctgtgttcagaattacgagggtcggttggccgctatgaagacgagccttcgtgatgccgccgaggaaggttttagcaacgcccttgagcagattaattttttgaatccccaagtggccatgactactgccgggatgcatttcttggcctatgtcgaagatgggcagctttttcctcctcctgcatccgaagatcctgcgacggctacgatagaggttgtgtcgacgcctactcctattgcttctgctgacgccactgcttctattgatgccacccaacctgtcgccgaccccgttcccgatgccgctgtcccgcaacccggtactgactcccaaactctccaggaatgaagggccgggatgcgggttttaacttgtatttttcttttctttgttgggctcggtgcccggaacaaaatatcttgatttctttgttgggcccggtgcccggaacaattactaagtttgtatatatttctttcgtagaatatcttgtgcgcgcatctttttggttccaatgaccatttattacattcgcatgtattgtttgtcgttcacgttatccgaccataaacaacctcgctaacgaatccgttggccggcctgatcagggccgtttagcgtatcacttatagtcgttatcataccgcgagatcgaatagaaatgactcaatacttagagtaatcactaatacttgtatttatattcgttgttacaataacaatatgtgtatccgagtaggatcggattaacactttggaattacaacgatatataacttattcaacaaagtgaaaatttgctcagaaggtatgtcttcgtcgtgaaggaggaccatatgggctcggatagatctattcggagtccataccctcgataacgagactgtattgttcgacttcctcatgtacccctgatgaatagggaccatacagattcggatgcaacattttccggatccatacccctactaaaagaaggtcggcaattttagctgtaatatttcttcaacttgtcggcattccatgttcgcttgatcggtttgccttgtaatgtttccaacatatatgctcctttgtttaattttttagtgacccggtatgggccctcccagttagctgccaattttccgtcccgagcgtttttgtttccgatgtcatcacgtcgtaataccagatcggtctcctcgaactgccgcgggaccacctttttattgtaggcgaatgccatctgttgtttcatctttaattccctggcatgtgctgctagtcggacctcctccatgagtaccgactccaaagccaggacttcattgtttgtttcctccccgtgtcgtagtgtttgacttcgccgccaagactgttgtccgatctcgacggggatcatagcttcacttccataagtcatccgaaaaggcgtttccccggttgatgattggacagacgtccggatcccccataagacatgatatagctgttctacccaggtcgacctggcctcatacattcgcttccgtagagcctctaatatcgttttgtttgcggcctctgcttgtccgttggattgaggatgctctactgacgcgaaccggtgtctgacgtggaaattggccatcatctcttggaaccctctatccgtgaactgagtcccgttgtcagtgatcacttctccaggaattccaaaccgagtaattatatttctctcaaagaatttttgtactcgggccgaagtaattgtggttgacggggccacttcaatccacttggtaaaatagtctacagcgactatcagccacctcatctgtccttcagccggtttgaatggacccagaagatccatgccccatttataaaatggccatggcgccgagatggattgcaactcttcgggtggggataataatcttgatgtgtgcatctggcagctttcacaggatctcacatgtttggcggcgtccgcgctcattgttggccagaaatagccagctcggagtgctttccttgtcagtgcccggccccccatatgctgtccgttgattccttcatgaatcttggataggatataccccacccgatctggggccacacacaccaacaaaggactatgcaaccccttcctgtatagctctccgtcaataatcgtgtacatggtcgacgttcatatcaagcgtcgggcttccagctcgtcatctggcaatgttcccttttccaaataagttactatttggcgtcgccaatcatggtcggtgatgatcatcattacgcacgtcggctgcaacgcctgttgttgaattactattcggttgttcccgggttttttagtgcttgccaactttgacaggatatctgcctgggcattctcttctcggggaatgtgattcaccgtaatctcgtcgaactcggacatcaattcttttactcggctcaggtattttgccaacaaaggccctttcacctgatatcgtccttcgatctgggacgcaactaactgtgagtccgtgtacacttttacgttcttggcctcctgttcctttgcctgtactagtccggcgatcaaggcctcgtactcggcttggttgtttgacgtcgggaagcctagttgtaatgagatttccgttgctactccttccggattctcaattataattccagctccactccccttcttgttggaggacccgtccacgaataagatccaccactcgccgatcatcgggttgtggggggtgagttctcgtatgaagtctgccaacgcttgggacttaatcgcgttgcgagcttcgaatttcaaatcgaactcggacaactgaatgacccagtgggtcaacctccctgccaagtccggcttgtgtagtacctgtcgaattggctgatctgtccgtattactatggtgtgactctggaaatatgggcgtagctttttggcggcgacaatcagggtgaaaaccagcttttccaacttttgatatcgcaattcggagtcgcgcaatgctcggcttacgaaatataccggcttctgcgtggattctacctctcttactaaggctgcacttacggcttcctctcctaccgacaagtacatgaccaatacctctcccgtttccggccttgacagtaccgggggcgacgccaacgatctcttcatgtcggtaaaagcggcctcacattccgagttccattgtatgacggcttgtttcttcaacatcttgaagaacggcaagaccttttttgctgattttggcataaaacgggtgagtgcggctattcgacccgttaattgttggacttcctttttgctagtcgggaatcgcatgtccagcacggcgcggcacttatccgggttggcttctattcctcggtgtgttaacatgaaacccaagaattttccggccccgactccaaaagtacactttaacggattgagccgtatgctgaaccttcgtagtcgatcaaaggtttcttcaagatcctcgacgtgcttattaacatccgtggttttgacgatcatgtcgtctatgtacacttctatatttcgtccgagttgcgactcgaacactctattcatcatcctttgatacgtggcccccgcgttcttgagaccgaatggcatgacgttatagcagtagttggccctgtcgcctatgaacgccgttttctcctggtcgtctgggtgcattgggatctagttgtacccggagaaagcatccataaacgacaataccttgtacccggatgaattgtcgaccagctgatctatatttggcatgggatatgcattcttcgggcacatcttattcaaatcggtgtagtccgtgcacaccctccattttccgttcggcttccgcaccattacaacgttcgacagccaggtggtgtactgaacttcgcgtatgaatcctgcctgtagcagttcgtcgatatgaacctgcaaggcttgtgctctctccggtcccaatttgcgtttcttctgttccaccggtttcgatcccggatacattgccaatttgtgactgcagaactcggtatcgacgccgggtatctccgacgccttccatgcgaatatgtcgatgtttttcttcaaacagcaaatcaaccggttcctctgctcgggttccaatgctccaccgatattggtcacctgaccggccaggtctccaatcagaatctgcgggttccggtctccactcatctggggcttcccgcatatccagctccacgacattcacagaacgtactcggttggaactgtcatcgttgatttctctttcacttttccgaaccgtgtcgtaataacactgtcgcgactctttctgatcgccgcatatggtcaccacttgtctgttgttgcccacgaatttgagtttctggtgtttagtggacattaggatgtcccacttatgaatagtcggtctccccaatatcatgttgtattgggatggaaagtctgccacgacgaactccacttcttcggatttataagcttccctcgtccctagggttaaacgcagacggatggaccccatcacatttgtgttgccgccattgaaaccgatcagcatcgttttgcagggccttaatttcttcacgtccaatttcatctttcggaaggcattcaacatgattatgtcggcagagcttccgttgtctacgtacattcttcttacccggcagtttcccaccgttgctgatattaccagcccatcttcatgtccgggtaccaccccctccatgtcttgtttggtaaagtacaaaagaggaggttctggctttccgatccgggctttgaatttgggttgtgcctggaccgatagcacttctttcaaatactttttcctttgagtggcggtatctccgccactgcccatacctcccgagattacattacactcgaattcgggctccgtgacctggtcgttatcttcccggggcttctttccttcgtctttatgttgactttcttccccttttcgtttgttctttcttccttgtgtccgaataacgtactgtttgagccttccttcccggataaacttctcaattgcatcccgcaagtcccaacattggtctgtagtgtgcccgggcccgttgtggaactcacagaatcgtcatttatccagtccagccttgttgaaaactgggcggggccgttcaaccttcttcatctctgtaagcgcgacctccttccagatttgtgatcgggatacgttcaacggagtatatttctcgtacttgttttcgtatcttcctggccgggatttcgggtcattattccgagatcgattctcggggtatccccgatttttcgggggtgggctcctcctgtcatgacgctcctttcctcgtccagagttgttgacgacttccatctgttccaactccaaatatttcttcgcgcgagcacgaaattccatcaacgatttcaccgggtccttatagatggacttagcgaatcttgacgaaccgtcgagtccggccgatatcaagtatacgtggactctctcctccagcccctcgacttacagggcggcttctttgaatctatccaaatagctctgcaatgtttctccgggtagctgtcttactttgcccagagtgaactcagacttcggctgctttttgctggtcgcgaaatttaataaaaacttctgaccaaagtcttcaaaattttttatcgatctaggcggtagagtatggaaccacgtctgcgtcgggcccgtcaaggttgtgacgaaaatccttgagattatgggcttgtcaatgccccggacacacatttgcaagtcgaattcgtcgatatgcacttgtgggtcctgtgtttcgtcgtactttgataagaaggacccatcaaagtcgtccagatatctggccttcacaatgtcgtccacgaaaggactgttgttttgctgtccccgactatatttccggcgatatactggtcctgtcttctgacagaaattctgctctcccttcttaccatgtccgtcatcttgcggaatcttctcattgcttacccggtgactaggattgtcgtcggggctttggtctacgtcgacctcgtcacgtgtcacatttcatgctcggatttgactccgatttagctggtcggtggcctgcctttgatctcctgggtcggcgtcgcgtctctgagttatgtgagttctcagatcttgtggctgttctatccgcctttgattttccgggtctgtatttcttctttgatttaggtgcgtcctcaaatcctgtgtttcgcccttagggtttgatagttgtacccggtcagctatcattcgcagctgctgctccaattgtgccattcgttgcatctcggcacgtctccactcctcattacgttcctccatttggcgagtaatgtttcggatgtcgtcttgcctctgtaagttctgtcgtttctccatgttctcaattcgggttaggattgaattgaggacattaccaaccagttgtcctccgagctccccctcctgacctatcctcgtcgctgttggaatcctttgttggtctgtctgagcgggagaggaagcttcgtcggagacagcttcggtcacgtgtacttcttctctccgtgccacgttctggttctccggtaggcaaatctccctgttcggcatctctgaatgtggtacggaatggctatttcttgtgttaaccattgttgaaaggtgtgggactcgaaatttatcgtttccccacagacggcgccaatgttctgtaagtttcccagaacacaaatgtataacatcgaagtgctacgtgtttgatgttggatcactctaactctgaaacttcaaggatatcaatgaagactgatacctcaaagcagacgatcacagagatacacgaatttggggtggggtgtgtgctctgtataattgagagagagagagttagagtctgtgtgtacctttcaccagcaaacagtctgtatttatagatgcaatacctggctgttagctctctgaaccgtgcacggacgacttcctatattctcggcctcaatctgcacgttcgtaaccgcttgagcggactgagtcttggtccacgttctaccattcacattaacgtttattatactgaattgggccttaacatcaagcccaatcaccactccagaacacatctaatcatcaatgagtctgaaatcatttatcaagggattataatatcatgaaatattcgcacaaaattattaatttgatacattcaataacttggaatcacatataaattgttgaaattaagcataagttctcccctttaacaacttaattaacatctaacttttggactcctaaaaaattatgattaagatattaatattttaatcatcgatgttcaaacaacaacacaactttcatagaaaattaattatgattagaaatggctaaccataactaaatttccaagacaacgatagaatcttatactaaactcacatcaaacatcaccaaaatatttaatgattcttgccattttatttgttagctcattgaatagcatcaatttaaatttattttctcgtggtgttaatcaagcacttaagatacattatgaaaaatcataatgttacataggcgaaaacaatggggtgtggtggtggaggcgacaacgacgataatggtggtggtggaatgagtgatggtggtgagaatgtgatttttaaaactaaaaactaaatttgcaaacattttttcttgatttttaaaatgaatgaaaaattgtttcgaaattgaattaaaaatcatttcaattccatttttttcaaatgtattttgttttaaaaattacatttgaaaaaaaaaatctatcaaccactctgaattgcactaaggtaaggccattattgggtaatggccataaggcattagcatcagccacaaaattagcattgccacttgccatacatgtgtggtgccaacttatgtagatggttttcttagctagagaaaggatggagtcatggacaattctagggtgaaccacttagtaaatagttcattgtgcacaaaaaaaaaaaagtggcctttaagttattcttatactcactataatattatgcaccttccgcatcatattatttctccttccccaaatttaagccaactccaagtctccaaccatgcatggttcactgccaccatcatatgtcgttgttgaaagcgaattttggtggcaatgttacgacttccccccttctttctcctctctcttccagaatcaccacatggtctcctccttggcggcgacaccactttatgatcctgctctcccctttgtcgttgtcttgttgcaccatagtgtcacaatgtcttctagatttaccatgtcgtcctccacgtcccttgaagctaacaactccttctcacctgaagatggcaatgacgtcgtctatgattttttgctaatgtcatcgacaaggatctcaattctcttttctcaaaacgcacatgagatcttatgggagaaattcaatttttcattagttttttttttggcttctaaagccatatttcaattctctattttagttgatttttcaaaaattaattggtgctctttttcatctactggttcactttgatttgatgaattctagttttttcctttgcacaacaaagaagttatattattatagagtgacaatgatgcaaggagttccaaagaccaccaggtactacaagaagccaccaattatctcccaacatgaaacataatattaaagtgtagcccccaacatacacaactagctatcatcaaatccctgccagagtatacacactaggggtgggcatggattggatttttaagaatccaatctatatccaatttatatctaattaaatggattggattttaaatccatatccatattctttaaaaaacaaactagatttaagatccaatccatttaaatggatatggatttggatatatccaatttatatccacttaaatgttataagattttttttacaaattttagttattaaatactaaaaagtgaaaattttgtacatgtccattgaagagctattttcaaccgaccatggtcaaaactattttttattgatattggttagtgcatttttgacgtacctcaaccaaagcaatttcgacagatatcggttcagacatttttagtctgacatcaaccaagactattttttgttgacattagttagtgcattttcagtcgacattggtcaatgatgtttttggtcgatcttagctagggttactttttggttgaggtcggttatgatctttagtcaatgcactttttggctgacattgactaggggttttttgatcaacatcgatcgtgactaatttttagccgacattggttaggatttttgtgactaacattgataagattttttttttgccgatgtcgatcattgatatttttttgccaacattcgtcaagacatttttttatcgacgttagctagatttttttgttgatgttggttgaaactatatttttgttggcaacaactaggatttgttggtcaacattaaccatgactatttcttttggctggcgttagctagggatatttttgttgacatcaactaagattttttcgattgacgttaattggaaaaatattttgaccgatgtcaactaggtttttttggatgatgttggccgatgattttttcaaccgatgtcggtcaaaaaatagtcttgtctaacgtcgacaaaaaaactatagtcaacgtcgagcgaaaaacctacttgatgtcgataaaaaataatctcaacagacaacaacaaaaaaacttagctgacgtcagtataaaaatagcatcaactgatgtcgacaaaaaaaagtctcaatcaatgttgattaaaaaaacttaccaacattaatcgaaaaatagactcaacgataacaacttaaaatcatcattagtgaacgtcgacaaaaaaaataatctcaaccaaagttggtaaaaaaaaaattcaaatccaaatatccaatccatatccatttcaatattcaattaattggattggatttaaaatccataaaaatggatttggatatgaaactaatccatttaaatggatttaaaatggattagattggattggatatagattattttatggatatgaatttttttgcccagccctaatacacacaatggttaagtaatacaccctctcagtccctgtaattatgtaagaagtcaccgaagggagaagagggcagagatagagaaggaaaaaagaccactaatggttaggagaacaattttggggagggagataagggaaaaagagaaagaagaaaaatgaaaaacaaaaagccaaaaatcacctccaacgatgatttgtgacatttgatggagaagatccgagaagagtgtaaggaccctccctgcggcgcgggtggcgccagatcccgcgctgatagcgccgggattcttctgcagaaaccctgttaagggtgtggcgcggacgacgccagacccactggaatatggcgccaagggcgccaggctcgcactgagagcgcaggactctcgggaggttcacgccaggagcgccagagttggtgctgggggtgccaactggatggaagtggcgcggatcacgccacaggttcggcaggttcacgctggtcgcgcaggtgtggcgctgatggcgccacaatgtcggtgcagttggcgcgagatctggcgcggatcgtgccagacctcggacaggcccagtatataagggctgtcgcgtttttcagaagaagaaaaccttcttcttcttcctttgagcgccagcagccatgggagagcttcccaagctcccataaccttgccttgtgaccccaaacacttcctagacaatccaaacctcctagaaaccttgagagagcttgaatccttcctccatttcaccaaaaccctcttgttctgagaaacctccattcgcaagagaagtggagagaactcgagtttgacgaggaacgatgactacccatggacacccaagcttggaagagtgtcccagaggtcttttgtgtcaccattgaggtaagaaactcgagattctttggttgtttaagatttggggttttgggtgaatagtgacccatttgtgatagagctagaattagctctgggtccagttgagagatgtgtttagaatgatgagaggaggaaggattagctttcagtttgtgatttggtgaatgttgattttggctctaggttgtgcatgtgtgacttggattgagtcacttgatttgagacatgcaagagccttgttgaggggcttgatgtgcctgtgaggctatgggaacggtgtctcgtgattagatcgttcaagccctatggaaaccctgagttattagggtggggtgagctgtgatgcttattgtgaatggcttgggttgagtctagagggactcttaggccatgtttgatctgagatagaccactgagggtctatggaaaagcttgtagaggatgagcctgaggaaccttaggtagataacctaagttgatagaaaggactgaggttcctttctctgaggcagttgaggactgtctgatgagcttgaacttgttatgcttgaatggtctgtaatgtgcgtatgtatgccttgatagggcttgacacgaggtgtcagaggagcagaccatcattcaaaaagcagagttgtgaggcaaagcttgccaggtaagctcatcgttttggggattattccctttctcttgtttgccgccagatgggtggtttttgcatgccatgtgtgaaatatatatatatatatatgtgtgtgtgtgtgtgtgtgtgtgtgtgtgtgtgtgtgtgtgtgtgtgtgtgtgtgtgtgtgtgtgtgtgtgtgtgtgtgtattgatgtgcatgctattttggaaaggccaatgtggtctattgatgtatttgatggcctagtgtgtgctgggctggaatgatgaaccctaggatagacactgagatagtgtgagggtaatgagacacctgatgtggtaggtgtgagtggccatgggccattgatggatgaacacagtgaggtgttcagtgaccttgatatgatgcagatcatgagatggtctgtgctggaatctataggatactggaatagtattgggctagctgaggttccctagccagaggaagagtttgaggactcccttggaatggctgagattccttgggaggtgccactgctctctgcctagagtcctaaggatggattgccctgtatggatgttcctccttaggcagagatgatgaaagtcctgagtggttaccctcaggccagtttatgtgaaagtcctgaggaattgagagcttcctgtgtggattgtctctctcaggcaggtgattagagatcctgagggattgagagctcccggtgtggatagcctctctcaggtatctgattggaaagtcctgagggattgagagctccttgtgtgaatagtccctctcaagcagttgatgagtagtcttgggggattgagagctccctgtgtggatagtctctcccaggcactggaaagtcctgtgggattgagagctcccggtgtggatagtctctcacaggcagaggattggaagtcctgagggattgagtgcccccggtgtgggatgatctctctcaagcatgtgtggtgaaagtcctggaggtgattgccctatatggatgttctttcccaggcatgtgctgtggaaggcctagatgggccaggcattagacagatatgttgtatctctaagagagggctttccgaggggatgagagcctagggcctcttagatgagccatatctggattccttaagtcctgagtagatgactcagacaatgtttgttcaatggatgaggcggtgcctctctggtatgagaagtgtccagtggttgacacttatgttatgtacctctgtgagatgtgtctgagatggcttgagagccagtatgaggtgggatacctctgatgctgatagcatccagttagtacccaggtagctgggaaatgtgttatagtcaggacggtgtcctaggctctgttatgttttgcttatgtttgtgcttggggggtgaaccagggtaagggaggatctcccaggaccctgagcttactgagatgtttatctcacccctatcgtgggttgtggttttcaggtgcttctagaggagaggagcaaccacagggcaggaggccctgactgagtgtgctggagaggtcatcggctgcagatgacgtctagaagagttcttttgtttgatctctgtcttgtacactgtatagggataggatgtgagtgtacaccagttgttctgtacatatttatgatgtataaccaccgatgtggtagaactatgagttgtatatatatgtacagattatgttatatgtatgagtttttgtttcctcctgattatctgtgtctggtttgtatatgcctatgttatatgtttgagttaactggatcttagaggcttgtttatgatgtttatggtgtgtttttatatttcatgcataatgtaatcaagaaattcgattctatcgcttccgcactgcgtttggttaacgctgttagcgcgcttatgatattattgatgataacacgtccgggtgttacaaagagaacataaatatgatggatcatgtgtatgatcagataggccagagaaagttaatctaatgataaataataatagtttattttacactacatatcagattgtgcatggaagcaatgccctatagtcaataagcgcatattttttataatcttaggagtaatttgataatcaataagcgcatataaaacatgcttttgattacacccattattgagaaaatgaatggcagtttacaagtcactttcaaccaagtttacaagtcagtttcaaccaagagtcatcactatcagagcacgtgaaatacaactgggctttcgtctcttgatagttcagtgatatactccttaaggtctggtttgtttcatggccttgtttgttaaatatatatatatatatatatatatatatatatatatatataattagaaattagaataactatattgtatgatcgagtttatagattttattttataaaaaaagcgtttagggaactttctaattttttttatatatttcaatttatcctttatgtcttatttttaaattaaaatttagtattttaaaaaataaatatcaataattaaaactaaatttgtattacaatatacgtttgttttaacggaaactattacaatataaggtattcatcataaatttaaaatataatttatttatttaaaatatttttattacatattttgattataatataatttatttattatagaatttagttatacaaattaaatatatatcatatgcattttacgttctcacatagcggtatatgtgtatatcagaaaataatgtgtatgtcacccatatagttgtattttcatggaaggtacttcttggacaaaactcatatagccatataggtattacttgtatcactttccttttctaatttttgatagtgttaataatgaaaaaaatcatctaacatttttgaaatataaaaatgtattgagagcaattataatttacataaatatagatattttggatttttttatcataacattatgtattttgtataaatttataatatttttattttatagaaatattataaattatttttttctcttataaaaaatattttctagatccaacactgtgtgtgcaacaatgacgatataattttagtgttaaaaaaataaatttgttttaataagaacacacttttttaatacagttttatagttaacattagttttgaaaatgatatataactatatcgtgtgttgtatcgacaaataagtatattattacttttaattaatattctttcggatctcgattatatgtaataagagtttttttatttttttccctctattaattatgtcttatttaatgagtttctttccaaaatattcttcatttaataaaatcaaatatttttaaatatttgatatcaattatcaagttacaataaatgataacttaagaaaaatattattttttaattaaaaatgataaaatttaatgaaattaattttcttaataagtatgaaatatatattttttatttttataatcgagacaagagggagaaacttaaaaaaaagttaaattataattttgatcctcctaatttttttaattcataattttggtttctttatttttaattgtaacatttgatctccataattttataaattgacgattttgatattcctaatatattattaactaataattatgattaataaagttattaaattaattataaattaaataaaaaatgttaatcttttaaaaattttaaaaaagattattaaacctaatgtggtattgttgcggatggagtcacatgtgatggaggtggaagaagtgtttgcagagaagaagaggaacacaatgttttgaaggattagaattaataatttttttaatacttaatggtttttaattaatttataattaatttgttaataatctactagggaaccaaaatcttcaatttatagaaaacttaattacttgattccttaattataattgaaggtttaatttggtctctcaattattaaaatgttcaatttgattatttaattgtttaaagtgaaataattatacattttcctaatatttgttatttatttaaggaaaatcgatactttttgcaccagtgaagtaaaagtttgaggagtttgaaaacgctcttttgcatcgattgtcaaataactgatttaaagaatacactattttatatgacacaaaaactatcaattttttttaaataattatcgaatatgacaatagggatttaagtaatttattttaaaccattgaagaatcaaattcaaccttttaataattaataggtcaaattgaatattaaaatataattaatggatcaattatataattaagtctttatagaactaaggaatctaaatattataattaaaaataaaaaaaattaaaatcataaatttaaaaattttaataattaaaattacaatttagcgttaaaaaaagatatagagtgaataatatagtaacctcctggttctcctgcacatggatggggcagggcaagcgaactattagcgaattattaattaattaatagaggaacaaaactaaagaatgaatcaagtgaagaagaaaagattcagaggaaacaggactgaagaaggggttctgtcatctgtggtgtgtgcgacaacgacgaatctctctttcattcgattctggtaagtccctttctctctaacttggctcattgctgattgctcattgcttcacaacaatgcatcacatcgtgccttttgatttcactcactattcttattcctgcctcaaaatactatgcgtcacactgcatttaaaacagatctgcattttttcacgcataaaaattactttgttaatgtcaataacgcgtcattttgggtttgttcagatgtctaaagaaactgacgtggaaaaccctagtaataaccccactgttcaaaagggtgttgatgtgaaagaggatgtaaatgtgagtgatggtgagggaaattggtacacttcattggtgcatcaaatttcagtgtatggtgtggctgctggttattgtttgtctgcttcattgctttccataatcaacaaatgggcagtgatgaaattcccataccctggtgccctaaccgccttacagtacttcacaagtgcggccggggtcttcctttttggctggtttaagctcctcgagcatgacccccttgaccttatgaccatgtggcggttcttgcccgcagcgatcatattctacctgtcccttttcaccaacagtgagttgctcctccatgccaatgttgacacattcattgtgttccgctcggttgttcccttgtttgttgcggttggggagacgctgttcttgcgccagccgtggccgtcggggaagacgtgggcctccctgggcaccatcgtgaccggcagtgtgctctatgtggttacagattatcagtttactttcatggcgtacacctgggcgttggcctacttggttagcatgactatagactttgtttacataaagcatgtggttatgacgattggtttgaacacatggggtcttgtgttgtacaataatctcgaggctcttctgctttttccgttggagcttctcattatgggtgagctgaagaagattaagcatgagatccaagatgagtctgattggcactcattccaagtcatgttgccagtgggattgtcgtgcctgtttggtctgtcaatctctttctttggattttcttgccgcagggcaatttctgcaacaggatttactgtccttggtatagtgaacaaactgttgactgttgtgatcaatttggtaatatggaacaagcattcaacatgggtgggtacagtgggtcttttgatttgtatgctgggtggggttatgtatcagcaatcaacaagcaagccgaaggctgcaaaacaggtgagtgcacaggaaaatgagggggaacaagagaagttgcttgagatgcaagtcaattcagagaccaacatcaataataatgaagtcaataaaccaagggaggaaagctgaaactattttcttataggacaattccatatttcctttcaagtgtatgtttgtttcacaggtatttgatataaattattctcattttttgtaactgtcaattcacgattctttcaacgctatctccttgaatggcaagctcatagatattctggtatgtagggttttatttactttagctgctgtaatgtaaaatctattatttaagtacttgatagataaaatggcattcaattcggttcttgaatttttaagcttttaaagtggaccagttttatgtttcaaatcttagtttgttcttgtcttgctcttgatgcttcaaattctgactgtgatgtaattgaaatgttgtcacctctccaatcatgtgtttttcagagtctatttttcttatcatggatctgatgactacacataattgtagttatgtagtatctccataatttaaatttatttgatagggatctgaagactggcttgatgagcttgaaagacaccatctacaagaaggtgaggtcgtctttctctccggccgccatacggttcgttcgccttaaagccttaaagccttaaagacgatgttgaacttagttcatatttgcaaccaattttagatctgttgataaggtagttgtatcaatgcaattggcatattttaacataaccaaaacaactcctagactgcccttgcagctatgagaagtgataactaatgatgcatctttctaagtagaagactggaaaaagctttcccttctcaacctcttgcccctaaagttcttatatccggtgtcactgaagattagtttattgctgaagattgattcatgcttgctgaaatcaatttcttacactgagaaggctttaagaaatggtttcctcaatcctgtgccaattgccaatagctttgagctcctcataattagatttggtgttgttcactatagctcctttgatgtaattagaatttagaacacacacacagctagcattagctcctgccctctgaaataatctttaaacttagacatgtttgttttgactaatgcacttgataagaaaaatcaggaatagataaaaatactactcaaatatattagttgggctatatgcatttcatattcattgttgttaaatagcagccatagtgctatagcatagtgtgttttctgcaaaacaccattttatggctatgactttttgagtttctgatggcagccagttttattcatatgagttatgggccctatgttcctttgaagttacttttaaaaacagctactatactttattttttcattttggtgatttgcattctttttccaatctattgtcttgagcctaggctataagaggtaaaggtcaacgaaaagatcttttgggatgcatacaacccagttcttaaaccattatagcttcagtactgtacatctgagtacactagtcatggaacctagaagaatgaaacgaaagtgaagatgatgtgcactcggaagaacatggaagtgagacaaatgctaaacagttagaatagttacagttgattaggaagttaaagttgttaggttggttaggcagttgatgttgttaagagcagggaattagcttgaatagaaggggagactagagagggcggaggatccaggcagtcatagtgccgtttgagaactaagcaagtggttcagttgtgaaagtggaattctctcctttaatctctctgattcagtaaacctttacaaaattgtgttttctctttactctgtcattcagctctctttctaaaatctaagaattttgtgtctgtaacaactagtggtcattcagctctcaagccaagaaatctacctcttcaatgaccgatgcaacctcaaatggtttattcttgaaaatactttcatttcttctcttccatatacatcacatgatggcacaccatacaacataccacctctctagctcacctttatccatgcttgaagccccatgttgacacacatgatcctccacatctcaatgaaataagtcacaagttgaatattccactggtgagatggaaacgaaagattaatgataagaaaattattctggatcaaattattgttattgcttctactttaactttgtgttggcactttctttttaaatgttcattataaatttatgggacattcttgtatataaatgtgcaatggctgtgctatttaaagttctataaagtaggaagcaccttagccaattggttatctacagaggcttttgtttttaattattctcaagctgaaagtgctatgaattataaaaccaaattgtattaacattgtatttggaagtattgaaaagcagcctttgctttagcagatacttctcttctgttagatatcattttgaattatattataagcttgtatggactctaaagtagcagctttattagtagctatgctatttttttccagcaatgcttcaagattatacaggtcttttttctttatttctatttttggctcgaatttatgaaaaggatgttttacactggaaagaaaaataaaaaaggaattttactaatcagttccttataagtatttgctaaggaatacaaataaaaataaatagaaaaaacattcaatatgctaaaaataataaggattacattttcatttaatatttcttatttttattcttcattttccacttgattacataacctggaaaaataatgcacaggaaatgaagaaatggcatgctttaataattggaaaatgttttaaattctttaattctttaattcattggttgaaccatgaaacttactggtattgttatattatttttattctttaattctttaattcattttcatttaatattccttatataatgaacatgatttgcaatataatattgtgacatttgtttgaaaccatgaaattgattctaatcagtgggaaaatacttgattgtaattgttgattggtatttgttcttactcgggatgaaagcactcagcccagaaaatgaaaaatcaagtcttctaaatattttcacttggttttatgactttggcgttgtctatttaacattcagtttagctgttgctgaagttactcgcacactggctttccacctccttaaacattcgacattcagtaaggggggagagaaataattgaattttgagttgaaaggaaagacaattttgaactttgtttctaaaaataaacttttctaatcctttttcttttactttctttccaatcaaatagaaaaaaagtgtatcgttatctatttttttttttcttttctttctaatcaaacataccataaaatagcaaagtgacttaaaaaatcggtatttattttcttatatatttagaattatggaccctcaaaaaatcgtttgatctatatattagattgattgggtgacctgtgacaattcagatgttaatgaatcaggaagaagctgatagcaaaaacaataactccaaaataattgcatcactgttttgctcacacacacacacacacacacacatatataatataatgttggaagaatttcctacccaatctggaaatgtggttcctttataaccacatattaatagggacttcagtcttggtgaggttgtaatttgtatagtacatccatttcaatttggaagtcagtgctattgttgatgcattcagaccattgtaaggataacttatcaatttacttcttattcattatcctagcttccgatgcttcattggttttggtaacatgaaggtttgaaagttctcccaattctttgatcccattctctttatgcttgcccacaataaagaaatccaaatgctgtaaatggtgtaattttcccattcctctaggcatctcttttatagaagtttcaacaatatcaaaatgatgcaagtttactaagattttgcatgcaactaggcaagtaaatcagcttaaagcaagcagacaagttcaaagtttgcagattgtacaaattacatagtgactctggctttgtttttatatatacttgtacgagagagatttaaataacgcaaataaatcaattcacctattgaatcaggcaaaatatctacactttggaagtcacgaaatgataaaactctcaagtacatcaactttgacattatgatacatggtgttttttcattgttgaatggagaaacttcaaaattgataataggcaagaatgttctcaaaatttttactctaccaataacttcaaagttgtccaagactgaaccattgaatttgataaatgacaaatgacgacgagtcttgatatcaatcttggtttctttcccaagttcttctgatataaaataaaattctccaccaagggatgttgctagatcgtgcatgagatcatgcatcacaaaacaattgccccaagtccgactagttgaatgttgaaataatgatctagaaactagattaatcaaaacactcgaaaccaaatccttccaacgtcttttcctttggtgactttaaaagatctttagccatccacaacaagattaattcattttgttgaaattcaaaatccttaggatgcaatgaacaatacacagaagaacactttaaatgtggagggagatagtgataactaattctcaatgcttgaataatgttacactcattttcagaaagtttccaaatgtcactatttagtatattattccaatcccttatatcatacttcttctcaacattcctccaagcgactgtgcggctaaaggcaatccattacactttttaataatgtccctgccaattttttctagagtctttgcattctcacttgattctagtgaaagacatgcatgttttacaaacacacaccaacaatcttcatttgacaattggtttagatgatcgacaacgttgaattgtatggaccacagaagctacctttttactgcgggtcgttgtgagaattttacttccacagaattgtatggaccacagaaacttgaaacggttttttaagaagactccaattaacatagtcctcaatccatacatcatccaaaacaattaagaactttttgtctttcagctcgtccatcaaatcaagatgaagtaaatttagatcattcaatttacaagcttgtccatcaaaacaattaagatagattttgtgacctgaaagctatcaaattcttcagaaacacaaacctatgctttaaaatcaaatctgcttcaaattgtcatcattgtatgccaattgggacaaagtactttgtccaaccccacccatgcctagaataggaatcacagacactccttcaccatcattgttctcttccaacatcgacttgattaccacctccttgtctctatccttaccatatatatgtgagatccatcttctagagatgttgatggagctttccatcacacatgctccactgcaatctctttcaaatgaagactctcattgagttttaaaacagactctaacctgtcaactatgtcttctaacttattagctctctttctattcaaaaagtgacaaatcaagttgcttacctgcttttgagtggcagctttggtagaaagttcaccaataagtcatcggcttcatatacagcatctttgagagcattgagccagtccttgacattggcatcagtgatttgtttcttctcatcattatcaagcacagctctatccactctcagagtggtgtctgcaacttctgaagcaacttcttgtcaagcttaatctttccacagatcaagttgacaacctcaggtgaagctagcttgtcgaaaacaacatcaaggaatgcagagaggaatgcaccacctaccattgcagcaaccatgatttcaggaacaacttatgattagagtaggaaggcaaaggcaagaacacatcacgcctaccgctcttgccataaactctcttattccttataaagaattcttttatttttacacgcttgtcttggtcgaaattaaagggtcttctgaatgcatatccaacctgatggacgaatttatttcaaaatatttgagggatttattttcatcttattaacaagaattaaaataaacattatgattatgaataagattattagactttacaatgttatgtttaaatttgtattttcaataaaactagtagatcagaataaaaaaatactagtagtatatacattgtgtaacacatatctgtttaccatttttttcccccattttttcagtatttattataagcttatgggttggaattaaaaaattatgagtacaattgtatttttttgttatccgtatataggttaatatgagatgaaaatcttacatgatacggtaattatttcatcaaagtatattgttagaaaaaaaatttacaatacttttactccgtaaactttgtatgatttatgttttttgtctttaaacttttgttgattggttagtgtctctaaatccattttttttttataattttagttcttgtcatctatatttattgttaaatgagcatgtaaaaattggtgacgtgacatttacatgtatgtcagccattaatttaaaaaaaatctattatctttttagttttgaaattttttagaattgttattttttatacttagctttttcattgccacaaagccatttagtcatgtcaatttaaagaaaaatttttaggtatacctcgagcaagacatttttttttattctgatccattaattattcgtcatgtcagcattatgggtcattgttgtttcctacattaatgacaatttttaatttttctaggtagattaatgacaatttttattttttctaagtagattgctgacatgacgaataatgaatggatcagagtaagaaaatgtcttgctccaggtgaacctaagaatttctccaatttaaataacaaaaagaaaagtagaacgaactatagaaattctttaaatttgttgatgtcatagaaacactgcaaaacaaacatacacttgaaaggaaatatggaatcgtcctgtatgaaaataaacatttcagctttccctcccttggtttattaatttaattattgatatgatgttaacttgaatctcaagcaactaacttcagttgttcctgtgcatttgccttttttgcagcattaatcggcttgctagttgattgctgatacataacaccacccagcatacaaatcaaaagacccactgtacccacccatgttgaatgcttctcccatattaccaaattgattactacagttaacaacttgttcactacaccgaggacagtaaacccggtagcggaaatcgctctgcggcaagaaaatccaaagaaggagattgaaagaccgaaaaggcacgacaataacaccggcaaaatgacttggaatgagtgccaatcagactcatgtttgatctcacgcttcatcttctccaactcacccataatcagcagctccaaaggaaaaagcagaagagcctcgagattattatacagcacaagaccccatgtgtttaagccaatggtcataatcacatgctttaggtaaacaaaatctatggtcatgctaaccaagtaggccaagccccaggtataagccatcaaagaaaattgataatcggttatcacgtagagcacgctgccggcgaagatggtggccagggaggcccacgtcttcgtcgacggccacggctggtgcaggaacaacgtctcccctaccgcaacaaacaagggaacaaccgagcggaaaacgatgaatgtgtcaacattggcatggaggagcaactcactgttggaaaaaagggagaggtagaaaagtattgctgccggcaagaaccgccacatggttttaaggtcaagggggtcgtgctcgaggagcttaaggcggccgcaaaggactacagcggcggtgcaggtggtgtactgcatggcggttagggcaccggggaaagggaaattcgtcactgcccatttgttgattatggaaagcaaagatgcagataaacagtaaccagcagctacaccatacactgatattagatgcgccaatgaagtgtaccaatttgcctcaccatcactgcccatttttttcttttttcttttacagtgtcacttctttcaattctatttcttttcgtgtaagggtagagatatttggttcaattaattgttatgtcttaagacagtaaaaaaagtatccccagctagctttaaaagttttgcattatcaaacgaataacaacttttgaatatatatacatatatatatatatatatgttttatattatatgagaatcacatgaaataatttttttagagttatttatcaattttattattgattttattagaacaacgagattttaagagaatcaataaagaggatgatcaataattctaaaagaattacttttgattccttttatattatataatgattttttatagaaaaaattataagttaagaattacaaaatcaaccattagaaattgtgtaacacagaattggtcaaatatactctttgactgttcaaccaaaatttaaattaattgactatattaacacagttcatatttaattttgcatttatttaaattattttcttaattaaatgaaaaccatatatttaattgcattttgactattcccattttaaattgaattattttctaaagtattttggatattaaattgtttgtgaaaattattgtatctttaaattattttgtcatgcaaataaatgttgtaataaattatatatatctctacataattgtctatttctttaattttatttaatcattcattttaaattagtggttatttaatttttggattgaatttaaccacactactagaaataatacgatcaacatcatcactttaacattgatttttgataaaactgatattagcaaaaagatggtgacatttttgtaaataaattaattttgttaatatcaatttttagaaaaatcaatattaacgtggtgacgtttacatcggtttatgaaaaatcgatgttaacattgacacaacaatattgatttttaaaaaattgatgttaacatcgaaatatgaacataattttttaaaagccgatgttaacaagcataatatttgtgatttttcaaaagttttcttcttcttacacgtttagtttcatgattgtcagtcttcctccctcccttacgccctctcgcatgatgaaggcctatctctctctcacacaccatttccatttaaaacgactattctcttctaacttcaactccaactccaactcctaatcctttttctctttatgtcagtgtttcttttcccctctgcattttgccaccgacaacgtaacgattcgtggtgcccatttctaccaccgctgatctttctcagcctccaccgctagatttacctcttctcctttcggagtcacatttttctttctccaccgcaacacactcaccttcaggtatttcctttttttccttttaaatgttatttttgttgttcacttgagatttgtaaatcaaatcaaacggctttagttcattactcaagattatcattgttctccgaactctacacttgcatacggaattttttttttttatataaaaaatagtaaatggactttaggatattgtcatgatgcaatttaaagggcgtggaattggaggatatttggtcttcaattgtaggaagttacttgaatgttacttatgttatgctgtttggagttaccatttttatttttcaatgttagggatacaaaatgatacgatcctttctgacctgggcgcttgtgtatgtattttgttttctgttccaaatttttagtttttttatgaatggtttttggctatgcttatccaggttatgaatgctacaaaagtggttgaaaagaataagtcgaaaattgaacaacttcacttttggtgccagtattgtatgcaacaaataacgtgcttggttttgctgtttgtaagagaaataatcaattttttggtttttcaaaagctttttcaagaggttgttgcaaaaaaaaaaaaatatgatttttcccatcagaatacagctaattgaaatacgcacattttttgtttgtgcttaacttaacatgataacttcttgtgacaaacactgataccaactttcttttttctgtgttgcaggattttggtggctgttttgatagtatgtgagagagttggtgatatttttatatcatggtagaggattctatcttgcaagtattcagagaatgctatacttagatctgctcattaaaaaaaagtttgtgatttctcatttttgaattgatttattcatgaagggtcccaatgtacagtgaatctaagttggcatttttcatattttgttggtaccctaaaactaaggtataaaattatttgtggcaaaagaaccaaaagggtgtttttttaaaaaatatttaccgataaggtgcgttttcaaaaatatttgcaaatctggtgcaagagggggcctatatttacaaatctagtgcagtgtaacatgcctgaattaggcatgttacaacacgcctagattgggcgtgttgtaacatgcctaattcaggcatgttacagctgcaccagatttgcaaataggcccccccgatccccagttggttcatatattggcttccagtgttctttgactctgttaaactgccatcattctggtattttttttgtttttaagagatttttgaaggtgttttgagtgatgagaagcatgcgttcgagtcgtgattctgttcgtgtttgagggattaggatttgctgggcatggttaggttgtgtttagggtacgctcatgtgacgatagtttgtggttaagggtttagggtttgctgggcatgggacgtgacgtttgggccagggttggggtaggataaggtttcatggttatgtgacgatggtttgcggttaatggtttagggtttggtgggcatggtatgtgacatttgggctagggttgggatagggttggtttcatgattttggtttcaacttggcaaaatgcttcaccttcttcatcagctcatgctcatagtcctcagagtaaccctttaatcccagcaaattgctttctcacctagaaaagattccactattccctctaataggaacatacagtcccttgtggccatggctcatgcggaatgaactcacgatatggcaaggactactatgcctgcctcatcaacctaaccaatatcaacagtaaatcattaaccattaacctgaactccccaaaccctaaaagcatgaacctcgacgtacattgtttcaacttgtgccaagtccatcattatatacacagataagaagcaaaacacaacaagaaaaaatcacgagaccctgttatcgaggaattagggacttgactgacctggggagtcgaataaagtcacaggttaaaatgagtttttcattagttgtttccacttatggcaggtccatcatcatatacacagcaccaatcacactcttcactcttcagtctgcattgagaagaagcaaaacacaacaagaaagaaaacgtctgatcatgtctttctcccattcaccttcttcatcagctcatgctcatagtcctcagagttggaaaaacctaaatctaagctcaagcctccagtcctccactagtccgctcagtcgctttgctcaccactggtccgctcaatcgctcaccactagttcgtgacggtgctcagtgaggacgttggtcttagtgctgtccttccaaatcccccaaaaccaaacctttctcacctagaaaagattccactattccctccaacaggaacatacagtgcctttgtggccatgactcttgcgaaatcaaatccgctatggcaaggactactatgcctgccccatcaacctaaccaacataaacagtaaatcattaaccataaacccttacaccatgtaccaatgtccaccaaaaccataaaccctaaaccataccccctacaatcctggaccgccaatcctaaaccctatactctaaatccaaaccatttaacacaaaccctagccatgtaaaccaacatacacctaacccataaacccacacaccttaaacaccaaaccattaatctcaaccccccaaaccctaaaatcatgaacctcgacgtacattgtttccagtagtgccaagtctatcatcatatacacagagaagaagcaaaacaaaataagaaagaaaacgtctgatcatgtctttctctcattcaccttcttcatcagctcatgctcatagtcctcagagtaacccttcaatcctcgcatacaaatgcaacaaataacttgttacaactttaaaggttcatacaatcataacttagcatgataaactaataagcggacactatatgtttactgtactacaactacgaaggcactattattggttacagggagatgtagcatgtgataaaagaaggaaagtacacaagcagagcgtgtctttacagatgcagttttttatgtgcctagacaatagacatgtttagggtttagggtttggctagggtttagggattggttggggtttaggggttgggtattcgggtgaggggttagggttgtgtcggcaggtgtacatggtgtttggggtttagggctttgtgttgagtttagggtttggttggggtttagggtttgcttgggatttagggtttggctggggtttagggtttgggtttagggtttggctagggtcttgggtttagggtttggctagggtttagggattggttggggtttaggggttgggtattcgggtgaagggttagggttgtgttgacaggcgttcatggtgtttggggtttagggctttgtgttgagtttagggtttggttgggatgtagggtttggtttagggtttagggtttggctggggtttatggttgtgtcggcatgcgtacatggtgtttagggttagggtatagggtttaggattggcggtccaggattgtagggggtatggtttagggtttatgaggcaaagtgtatatctgtccgtgttctactattttttgtcttcacacgcttggcaatttgtttttgctggtgagtggttcactggccactagatccagggatttcgcctacactcacgaaagaaaaagccactgcaaaggataaactattctcaaggtgagagaaccctcattgcggggttaacatcgttaaataatagttagaccaagcatgctaaacataaatgtcacaaacataaatgcccaccctaaaccctaaacccttaaccacaaactaacgtcacatgaccgtaccctaaacacaacctaaccatgcccagcaaaccctaatccctcaaacacgaacagaatcacgactcgaacgcatgcttctcgtcactcaaaacaccttcaaaaatctcttaaaaaacaaaaaaaataccagaatgatggcagtttagcagagtcaaagaacactggaagccaatatatgaaccaactggggatcggggggggcctatttgcaaatttggtgcagctgtaacatgcctgaattaggcatgttacaacacgcctaatctaggcgtgttgtaacatgcctaattcaggcatgttacactgcactagatttgtaaatataggtcccctcttgcaccagatttgcaaatatttttgaaaacgcaccttatcggtaaatattttttaaaaaaacacccttttggttcttttgccaattacttgttcttttagaaaatttgatatcactttcttatttgcttctcttcaatatgacagtaaatttaaatttttttgttaaggaacaacatatgtgtatgactccttcttcagaccatatgttgcgaaatgtatagttaaaaatttattaattcactttgtttaatttagttaaatgtttaatttacattaatttgtatacaaagtaatttacatccttcttagttctcaatgttagatgtttgacagtataaaaaaatagaagtgcattaaaacttttgcttaagcttttaatgtgtcttttaaaattacaaggagggaaataaagggccatattttcttttaaaggaatgacattctacatcggttatgtaatatacgatgtagaaagttactatacaacatcgatcacaagaaaaaccgatgtagaaaatgaattttctacattgatttttgataaaatcaaccttgtaagtattattcaacatcgatttggcagaaccaatgtaaaaagttcattttctacatcaatttctgaaaatactaatgttgtggttgcaacacaaaatcgatttttaggaaaattgatgtcatcaagtatatgataacattgatttttctaaaaatcgatgttaatttttgcatattttatatttttttggtttatttcttattttacgacatcttttttttaaaaaactgatgttgtatagtatatgttaactcaatttttgaaagtggatgttaacattgatactcttaaagtcagtggttttaacatcagttaaaaatcgatgttgaaagtcgaaaacaatcgtgttaaaagtctattttctagtagtatcaataatttaacggagatgcaaaattagttttaaatcattcattttttatcattttggcaaattgaaagtgtgaaaccattgatgattaagagattaacattaattataatatggattaaacacacaatcttatgtcacgttactaaattggttcacattaagttaatctcttgtccgccaatgttttggaaagatcaaaattgtgaattttataaactagaagattaaatttctctattttaaaatagggagatctaaattatggattttaaaaatatgaggactaaaattgtaggattaaaaaaatagagaccaaagttacactaatgaagtcctctttttatacctatgtgtgtttacccttattaaatatattttatttatctttaaaatattcatatcatatgagctataaaatcatacccaaataattaagattaaaatgttaatttttcgttatgatatctttatttttcaacttttggaagttaattatatgtgcaaatcattatcatgtagatcacatacatgaaatttaataccaatataagttttatgtgatatattatcttttttcttatttataaaactcaattaaataatttctaagatgaagaagtaattaatttatttttttagaagaataattaatttagttgttaacaataaatttcttctatttttttttattcgttagaatcaaagacagcgttacaagatttataataactcacacatttcttaaccaactaatagacccccttgattatctctcttctaaatgcatgttaagataatttctctctctcttatttaattaagggtatgctagtctaaaaataattaatgcatgaaacaatatgaaggagtcatataaaataacaaacaacttcaaaaatttgattttataaatagaaacaaaggtagtaaattatatcaatatctaattattatctttatagttaacatgtaatcatttaaatatgtgaacttacaccgccttcaacccaaaatcttaagaaccagatttataagtcttcttctcatttatatgatgttcagtttttctacttctacccaatatgagattttacctcacacttgtattacactacttgaccgtcagttagatatgatatatagcaattccattagacatgatgaatgcttcaaacctccttaactattgtgagtcttgtctagatccaaaaaatgaagcctgaaatgcaaaggtggtcaagtttctcttgtgcacgtgtaaatttgaggtttgtttctcagtgaacttaaagaaactcttcttcaacgatgaaataaacaatcccttccacgactccactcttattttaagcatcaacatctttgtgaatgggtcatttccattcttccagttcattctcgttttcagcactggtggcaactggcaagactatttaggcctctctaggcccttacatgagcaactaatgaaaatatggaaacaataatcaaagaaaattcatgaattcacagttttcccttcaattaaagacagtcagttggttttattctgtgtagctgatatgcgcctagcatataaggttcctaagctattaagagcaagaatttgagcattaagcattgataattgcccattttgtgtgaggattatgctgatttttgtaattgccaggaagtcaatcagatgtgccaatcttaagcaaaatcagaagaaaaatcaagctctgaagaaaactttggcgcgaccagcgccatgaatggcgccaccagtgccaagaacactggagattagcgttgttcacgccaaagccgcgccactggcgccaccagttctggtacctggcgccgtcagcgccagcatggagccaagagcgccattatctctgttggttagcgccaggagcaccaagttggcgccattggcaccattcgttctgtgagttggcgcgatcagcgccagactcgtgccacaggtcgacagaagttgcataattaaagctgtcaagggcaaaacagggacttcacaagctgggttataaatactaaaccctcagcattgaatgcatgacttttggagggagaaaagcacaaaaatagggtttttaggagcttgggtaccttaactagggttttggggagttgaaggctcaagtggaggttcttcttcatcttcttctccttgtacttcagctgggtatgccatttttgtatcacagccaaccacaatgaggtttggctgatttcatattgtagttagggccaaacactgaatgtattgtattggatgctattcttcatttatatcaagttatttcactttactttgattgcatatatgtttttatcttgctggaactgatcactctagttgggtattgaaaactagggggtttacagtaggaatgttgggattctatgcttggacttgggtaaagtgacaagctttacattatctagggatagaaatgtatgcttgcaaacatttcatgcatcacttaatgcttaacctaataaacgctactaaggaattatggtgttgaaatgggttaaagggttaaggtcactaagggattatgacttaactatgattgtatgacgatgcatgcattgagtaacttgtaatagacgaaggtagtagacaattcatgtaagaaggtaggaagcatttagtgtgggttgccttatctacatttctttacatatcgttacaatcttaattgcttgtttataatacttaatgttcataattaggtttaatttaattgctacacacaccccacaacaatttctataaataattgtcctccaacctatcgatacaatttgtaatttaattggtcaaacaatcctcgtgggaacgatatcttctcttatcattatattacttggaacgattggtatacttgccgaatacgcaacaagtttttagcgccgttgccggggattggttttagccaattttattataactttttatctttaaggttggatttattttgttactaacctgcttccagagtttatgcgaggtaccgctgaccccgtgaatctacagtttgatcctgagatcaaaaagactgttaagaggaactggaagttagcgagacaaaggaaggaagcagaggtatctagttctagaccaccatcagaagaagaataaggggaagaactagatatggctgagaggaatagggagcagctgaggcctgaggatgaactcatggaggacatccttgctcctttgttcatccggcctgcatccagcatagtcagaccacctattcaagcgaataacttcgacatccacccttctctaatcagcttggtggaacagagtcaatttggtggtgatgtgttgcaaacacatcctagttttagggtagttttaggttgtattttagttaaataattaggaaagttgtttagaattagttaagtttattactttattgcttttaattcaaaatactaccatttgagcattttcaagccaaaagaggagttcaaggcaaaaagaaagaagaaaacaagaatttaagtacgacgcggatagcgcgagaagccacgcggatcgcgccaagtgcaggattgaaggccatagtcttgaacatctcacgcgaccagcgtaggaagccacgcgactagcgtggattagtcgcaagcatggtgccatcagcgccagatccacgccattagcgtcaaagacaataagccagggcattcagcttgagcaactcgcgccgatagcgccaggccaacgcgatcagtgccaccaattcgagagggcagcgccatcagcaccgcagccgcgccaacagcgccacaaaagactagagcaagccaattgactcgaacaagcagcgcgattagcatggagtgtcacgcggtcagcgccagactttcgaacaagcagcgcgggtagcgcgggatcgcgcgcgggtcgcgccatattgatttagttgcctgttttaatttatatggttcgagatttagtacaggaataggctttattactttaattaaacttatctatatatatgaagcctctgaactgagtctaggtatccaaaagagccagaatacacattgttcatccattcttcatcctctaaaaccctaggaatcaagaattaagctgagtgtctgcacaacaatgaagcatattactgctgtgattttcttgaggcctatggctggctaaacatttcattgtgggaaggccatgaaccgatgataactcctctataatttgactggtattgaatgatatgttttaattgttttattctattctgcacttcttttcattcttatttgaatttgatcacttcaattaagtacataggattaagattcacaatgggaacattcaggttttaatttctgaaccgtttagaataacaattgttcatcacctaggaataggggtgcgtggctgcagagtctatgatatgttctttttgaactgatagaattcactaaggaattaggttttcgattcaggttaaagggttaattcactaaggaattaggaattagctaatctaggaaagacttattttctgaacaattaataacaggaacctcttataatatattctctaaatgcttaacttgacagaatcgctaaaggtttagggttcttgatcaaattaaagagtgaaatcgctagttatctaggatttacgaatatagaagagatttattatttgtgtacattaatgttaaataaccagtcaagtgaaagagtaggaatctgagggaattctgcctgaccacaattatccttccattggtaacttctcaaatttatttactgcatttacttaatttctgtttttgaacaaccaatcaatcaaatacttcttgcgtaattttctgttttaattcaatcacacttattagtattactgtggaattaccccaatccctgtggagaacgatactcacttacctgactttattacttgaaaacgatcggtgcacttgccgctgcatttgaatcgcaataggtggggaggatgatgaggatcctcatgactttgctgatagattcatgatgatctacgacaccatccgccatcatggagtgacggacgatgctattaggctaaggctctttccttttgctaaaaaagggaaggctcttaggtggttgcgccgccaagcttcaaacaatataaccacttgggatgagctgatggcaaagttctttgcccaatatttttccatggagaaatataactgttttggtgaatgagatcaccaatttcactcagctccaataagaaactttatgtgcggcatggaacagattcaaagagcttatccggcgatgtcctcaatatgacatgccagtagggaagaaagtgcgcatctttttcaatgggttgtcaccataatccaagctggtagtaaatggagcagccggagggtcaataagatccaaaactgcagcccagacacatgatttgattgactctttggcccggactgaaaatgaaagtgttgcaggtcaaccaaaaagagaggtcattcatcttggcagaactgatgcaatgttggcagtgcagaagttgttatcacaacagctagccatccttaatgccaagattgacaagcttgaaatctcaaaaagcccaagcttcttcaatcaaggcaggtgtagttgtctgtgaatattgccaaggggaccatgagcccaacgtttgtcctaccttggtgggggctgatccaattcaacttaatggtgtatggtatgataagaggcctccataaggttatcagaggaactataatcaagctttagtagttatccacttttgcgtactcgacaagtgcatcggttgctcaagtaataaagtgataagagagttatcatcccacgaggattgtttgaccaattaaattataaatcgtatcgataggttgggtgacaaataggttgttgttgtgtgtgtgcaaggtgaattaaaatctaactattaacataaagtattataacaaaatagataatggttgtaccaaacgtaagctaatgtagttagggagacccacaccccatgctcctgacattcttacatggatcgtttactacattcatctatactagctactcaatcatgcatcctcattcaataatagttaagccctaatcctttagtgacattaaccctttaacccttttcaataccctaatcccttagtgatattggttaggttaagcattaagtgatgcactagaaaagattgcaagcctacatccctatccctaggtgatgtaagacaagtcaccacacttagttccaagactaaagtcccaatatccctattgtgaaccctagctctaagctcttaaatagattgatcaggtctaaagaagagatgaagatattcaagtaaagtgtaatgaaataacatggcattaatgaactataacattctatccattccaaatgagatttacatagagtatttgccctaactacaaaagaaactagccaaacctagtcatggaatggccttggtacaacaaaaagaagcatgcttgctgatatacaaagaagaagaggaagggaagagggaagatccctcttcccttcaaccccaaaccctagctcagctcccaagccttcttcttcttcctttggtagtgattttcgtccaaaagattcgctccaatgctgaggcttcttttatttatagtgtagcccatgaaatctctattttgccctcattatgcagactctgcgacttgtggcgctcctggcgccaacacggcgctgacgacgccaacatccagaaggaaccacgctcctggcgcggtcatgacgctgatggcgctagctgaagaaaccgtggcgcggatggcgtgagcctggggctccaggcgccagattccagagcttgcggcgctggtggcgcggacttgacgctgatggcgccagtccttctgctctgcataattccttagctaatcacctgctaaacattcaatcttgaccaaaatacctcattgaagcacataagttacattcacaccaattggaagctatttatcatataaaatgatgcatttaacgatctaattgagcttggaaagcatcatgtgctagacacatatcatccacaaagatctcaaggaggtgggttagactataagtctaaccattatttgcaaccacctcccatcgctcccaaggagccctttaaattagagaaagctatgttgcagttggccaagactacaaatgaccacatccaaaatactgatgcatttatgaacgagacaaggtctcagttgaagaaccaaggtgcatccatcaggaatctggaagttcaaattggccaaatttccaagcaattagctgagagaccacctggcgatactgttgtaaatcctagggaacatgctaaggccataaccaccagaagtgggatagtgattgcccctaaagaaaaatctaaagtggtctcaagagaggaggaaaaagaagagcctgtaattgaggaggaacctgaagtagaagaaacctttagcagctcaaaagagaaagaaaaggggaaggagaaggtctctgatgacttgaagcagcctatgaatttttctaaattcgagaaacctccttatcccttaaagacaaagcaaaaggctcagacgcaatagtttgctaaattcttagagatgttcaaaaagttgcaagtgaacatcccatttgctgaagccttagcaaacatgcccaactacgctaagttcatgaaggaaatactgtcaaagaagcataagctacaagaatgtgacattgtagttcttacagaggaatgtagtgctatcgtccagaggaaaatgcctcccaagcttcgcgatcctggaagctttaacattccaattgctattgggaatgttaatgtaggtagatctttatgagtattaatttaatgccgttgacagtatgcaaatccttgggcatttctaaactaaagcctaccatggtgtcgcttcagttagccgataggtccttgagaaagcctagtggagtcttagaggatgttcttgtcaaggttgacaagttcatctttctggctgacttcattgttttggacatggctgaagagagcgagacactgcttcttttgggaaggccattcttagctacagcccgtgccttaattgatgtggagaaaggaaagctagagttaagaatggatgatgagtcagtggtttttaatgtgttcgatgtaatgaaaaacccttttgataggaatgattgtttctgtattgatgtattggatgagtgtgtccaagctgaagaaattctaatcaagggaatagaagaggaattagaaccacaagattctgtcatacctcaagaagtggtggaaatagtgatggaggttttggagaagaaggcaactgatattgatcatggagcaccaaagctggaattgaaggagttgccagaagctctcaaatatgtgtttttgggggaagatgagacataccccgtcatcattaacaaaggcttatctggggatgaagaagccaagctgttaaaggtgctcaaggagcataaatccgccattggatggtccatcttagacttgaaggttattaatccctcattttgcacccataagattctgatggaggatgatgtgaagccagtgaggcaaccacaaagaaggcttaatccgatgatgaaggaagtggtccggaaagaagtggtgaagctttttgatgcagggatgatttatcccatttcagacatcgcttgggtgagtccggtgcagacagttccaaagaagggtggggtgaccgcggttcagaatgataacaatgatctgatacctactcgaaccatcactggttggacgatgtgtgtagattacagaagactaaatgatgccactaggaaggatcattttttgctccccttcattgatcagatgttggaaagactagccggtcatgctttttactgttttcttgatggatattctggctacaatcagattcccgtggcaccagaggatcaagaaaagatagcattcacctgcccctttggagtatttgcttacagaaggatgcccttcggtctatgcaatgcgcctacaaccttcaaaaggtgtatgctttccatcttttctgatatggttgagaaatttttagaggtgttcatggacgatttttctgtgtttggttcttgttttgatgcatgcttaactaatttgtctaaagtttgaaaagatgtcaagaaacccaccttgttttaaattgggagaagttccattttatggtacaagatggcattgttttgggccataaaatctcttcaaaaggaattgaggtagatgaggccaagcttatgttgattgaaaaattgcctcctcccacaaatgtcaacagtgtgcttagctttttaggccatgctggcttttataggatgttcattaaggatttttctaaaattgcaagacctcttagccaactgttgactaaagaatctgattttgtctttgatgaagcttgcctcaatgcatttaatgtgttgaaggaaaagcttacaactgcacttgtcttaacagcccctgattggaacctgccctttgagttaatgtgcgatgcaagtgcttatgccattgaggctgtccttggtcaacgtaaggataaatttctacatgttatatattatgctagcaaagttttgaatgaggcacagattaactatgccactactgaaaaagaaatgctagttgtagtatatgcattagataaatttagaccttacttgattggttccaaagtaattgttttcactgaccacgctgctcttaagtatctattgaccaagaaggatgcgaagccacacttattgcgttggatgctcttgtttcaagagtttgatttagcgataagagacaaggctggggtggaaaacaaagtagcagaccacttgtcaaggattcaagctgcaaatctgcaagataggtcaaagctggcaatcaatgagtcatttccagatgagcagatgatggctgtcaccaatgctccttggtttgcggatatggctaattataaagctatcggggcaatccctgaagacttcacatggcagcaacggaagaaattcttgcatgatgcccgaagataccagtgggacaacccatttctgtatttccaatgtgctgatggcattatcaagagatgtgtagctgagtttgatttccaaagatccctggcattgctatgcttcaagttatggaggacattttggaggcaaaccgaactgctcacaaggttcttcagagtggatattattggcccaccttatttaaagatgctaaggcatttgtggaaaattgtgataggtgtcaaagaacgggtaacatatctcggaagatgagatgcccctcagtaacatcttggaggttgaattgtttgatgtttggggaataaacttcatgggaccttttcccaagtctttctctaatcaatatatcttggtggcagttgattacgtctcaaaatgggtagaagcagtggcattgcccactaatgatgctagagtggttgcaaacttcttgagaaagaacatcttcacttgtttcggggttcctagagccataatcagtgatggtggcacacatttatacaataagcaaattgaaagtttgctcacaaagtatggggtaactcacaaggtggccactccttatcacccacaaaccagaggtcaagtggaagtttctaacagagaattaaagaggatacttgaaaagactgttggaagctctaggaaggactggtccaagaaattggatgacgcaatgtgggcttatcggacaacttttaaaacaccgataggtatgtcaccgtatcagttggtgtatgggaaatcccgtcatcttccggttgagttggaacacaaagctatgtgggccaccaagttcctcaactttgagctatcaaaagctacggagaagcgtttgttgcagctgaatgaattagatgaatttagaatttttgcctatgagaatgctaggctttacaaggagaaaaccaagagatggcatgacaagcagatccatcccaaggagtttacacccggacagcaggtattattgtacaactcgcacttgcggttgtttccaggtaaactcaaatctagatggtctagaccattcgtggttgtaagggtttttccttatggaacaatagaaatttctcctcttgacaccaacagaccatttaaggtcaatggatggcggctgaagccatattttggtggtcagattgatagggatgccgttacaatgcctttgaactcccctaatccatgaggattaaccatcaggctcgtgacgttaaacaagcacttattgagaggcaactcaattttgtgtttaatgatatggttgagtcttttccttaggtagaatagattattagctttgcagtctttgttgttagtttttatgaacttaagcgaattcatgccttttgtgctaatattgttatcattcatgtttaatcttgttcttgtgtcatgtttccattgaggcattgtaatctagtctcattttgcactttctgagatgactgttggtattttaggccttaagtccagcttctacgattttgtgcctgagctaagggtatggcgccatcagcgccaacctggcgctgttagcgccagtgcttctggacttccacgccagccgctaattacacaccattggcgccatggtctatggaatgtcgtgctattagcgccaatgtggcaccaacagcgctgtctggattctcaattactgacatggcgccaccaatgtagagatggcgccatcagcgccatggtttctggaatgccatgctagtagcgccatcctggcgccaaaggcgctggctggagttccaactcaaggtatggtgccctcagcgtggacctggcgcttagagcgctagcttcactggattgcctcgcgataggcgcgaactcggcgccaccagcgccacagttctggggttccacgctaatggcgtgggaatcgcgcgacccgcgcagaacttacggacctgttttgtcttttaaattttgaaactccccaacgcaattcacttccccaaaaccgccaagacccttttcaaagccctgaaaccgttccgttcaccacaacctttgccttcataaccaattcctagccttagctttctcctttacctcagccaaccaacttcatcttgagagcttcgacgttgttcctctgctcttcaaggctgcgtttgttttccatctctctcgtgggctccctctttgcacttccacattttaatctcctctcatggctcgcgacaaggtaagtgcttcttgttacagattgtttgggtgcttttgcagaaaccattgctagcttagggttagggcaatggggttttgaacatcatgctgaaattgcattcctgggatgcttacatgatgtgaagtaggaatggatgagtttttagggtatctctttggttgtcattttgtacaacaatggttctgagcaatttcatttactgttaagcatcctttttaatgagtgtatactcaattgcttggttctagggaggatttgtcatattgagggttatgagtaacaagagctagactgtttggtttaatctggatagaatagctttgctttgaactcttaattatcataatcattatgtatgccagaattaaatatgggaatcgtgcttggcacggacgatctcagtcttcttattcccttgtgcacaccttatgatgcttctatgactttgagcttgacatacttgcacatacacagaaaaacacataggtgtatgcacctttggtatgaaatgtatacttgatgccttctgtatttgttctgctttgatactggtgtaagttctgttgacttcaagtttaggatttttgtgcttaaggtataattgatcgaattgatttttgtgtacttgcttgtttaaccttggatgtttatgaccatatcctaaacttgaagttcttgtccatcagtcatttggttctttgcttgtcattcaatagttgatctcattgagaatgcttgtacactttattgttttacagtatgatttcaactaaatctgggaatctcaacactggtctgagtatgcacatatgtgttgtctgtgtggctgtttgttcaccctgtgctttgcttgatgccttggtgattggtatagtttgttctaaatctgggaattcccctgatccactgattaggcctggtctgtttggacaattgttgaaacaaatggtgtattggattttggttgttgaatttcagggtaaacaggtagataagggcaagcaaaaagctaccacaggaaccaccaacaagaggccacgcacttcagactttgacaacggccgcttccagttgaaggcgcaccaggagcgcttcgacaaatggtactttccaaagaagattattctagagtggagcattgactgggagacattgcctgaagactcccccattaaggaggttatcctgtgccgtcaatggcagacactggtgagctttgctgagccaagctccagttccatcttgaaggagtttttggcgaatgtagacatgccctcagtggcacagcaccgtcgtagctaggttcgaggtgtagtcgttgctttcgaccatgaatttatcgagagcttcctccaaacatcacatgacagcctccgtcattgcgggtttgtgaagaggtataacaggatgcagcctctcccttgcacaggcaaggcgacgtacagggacgacatgcctcagctagctaacgagctacgccgaggtatcaccggtcgattctccacatggaagatgaagatcgatctagactatgtcccagagaagctcaagaggcaagagctgcatccagaatcagacttctggcatctgttcgtcaactccaccattctcccgtcttctaacttgacggatgtgaatgtggagcgtgcttgtctgctatatgtcctgcagagggagattaatcttgatatatcctacgctctctcagattgcatcctgcacatgatccaggacggcaacagctgctccctattaggccactcctcgctcatctcttacttatgtatgcatgcgggattagaaatccccgatgacgagcctatggatgtgaaggtagggactacactgacccttaggacctaccaggatgcggtgaagcacgctcttcaagagcaactcattcgtgctgccgacctcacccctaaggagatggctgccaaaagcccgaggtatggacctcgtgacggcttagaggagcccatgcctgagatacccgttttcccccagccagtagcatcaccacagccagccgcatcatcaccgccaccacagcaggaagctcctgctgcatccagccaggccctccaccttgagtccatctttgaggacttaactacttatctgaggatgcagcagcagatagaccatctgaccaccatcactatgaggatccagcagtagctcgagcaccagactactaccacgtagaggatgcaagagcaaattgatgaccagacccggacacttaccacactttgccagcatttctctgttgacccctacagctctccaccacagcctcctccactctcttttggacttccatcaccagcgaggccgcattcaccatcatcatctcccgcagctggcacagacaccgtggatgaggatcaacctcactgatcttcctcgctctctatcttcattattttatgctctcttttattgtcatttccttttctgcactttacattaagtcactttacactttttgcacattgtgtggcaccgtcagtgcgtgcctgaacatatgatatttttgccatgatttggtacttggtttatgcatgagtatgtttcctctaataacgtgtcatctgcttgtgttgttatgcgtgtcatttgctggggacaacaactgtttaaatctgggaatgggggcacgttaatcgaggaaacacacgttagtcatacagttctttttgttaatcatgcgcctttttggtgaaacgttttattttggtgaaatatgaacagtaggcagatactttttggtcagatactttttatgacaaaaatttctttttgtgaagctatacagatagtaactacaattggttttgcgtctaattctaacctaaccataggtgtacatattagacacttttgataaaagcatgcttgtcccggatttagatttgcttgatcagtcacttatgaattggattttggaaaacattggtgacataaatcatgacatgatgttgtatggaatttgaattgagtgtgaatgcttgtatggctgaattcaatttgaaatggaaaacaatgtttgatctgatatcatcatgagtctagcttgataccatagccagtgagaattgtgcttatacagttaatttcttttgagggatgcatcactgtgatattacgctagaacttgatctatttctctttgatgcatgcataagttgatgtgataaaggcattttgttctattaagtttgggccaaatagacttgaatgaccattgctagccctttgagcttgagacctttttgttcaatcacctgatacaatacattaaccacattaagtcctctaccctaagtgagattggacaactaagtggttcagaaagaaaaagcatataaaattcaaggtgaattccattagaaacttaagggctgaaaagtaaagaaaggtcttcaagtgaagccaacaaatgaacagaaagaaaatgcattgttaagaaaaagaagaaaagaaaagaaaatgataaaaaggaagtagtggaatgaaaaccccaattttgatttgaatgtatctgaatttagcaaggtccaatctcaataaatcttagtcactgtccaaaatactcctacccattgagccaggccaagttacaaccctatcaagacattttgatcaactttgcatgtgtttatgtttcttatttttaggaattagagaataggatcaatcctatagtagtgctagagctgtggtggattgaaagattataatacccggacacttgagtgatgagtgaataattgccttagtgaggggtattcaagttagacttcaatgtttgatggatttgaaaatctttgtctgaagttttgaattggttcagttgtttgtagcattctgatatgtgcctagcatataaggtttcctaagctcttagaagcaaagatttgagtattaagcattgttaattgcctattttgtgtgagaattatgctgatttgtgtaattgccaggaaatcactcagatgtaccaaatcttaagcaaaaattagaagaaaaacaaagctgtgaagaagactctggcgcgaccagcgccaagatcactggagattggcaccgtttacgccaaagtcgtgccattggcgccataggttctggaacccggcgccatcagcgctaggctggcgctaagagcaccattgactctgtgggttggcgccgtgagcgccaagttggtgccaagagcgccattcattctagaagctggcgccatcagcgccacaagtcgccaggagtagagtaacttaagctgtcaagggcaaaacagggacttcacgagctagtttataaatactaaaccctcagcattgaatgcacgacttttggagggagaaaatcacaaaaatatggttttaggagcttgggcaccttagctagggttttggggagttgaaggctcaagtggaggttcttctccatcttcttctccttgcacttcagctgggtatgccattttttgtatcacaaccaaccacaatgaggtttggctagtttatattgtagttagggccaagcacttgatgtaacttccattgggatgtattgaatgctattattcatttatcaaaagttattttactgcactttacttgaatatctacatctctttcttagactttatcaatctagttgagagctcggagttagggttcacaataggaataatggggctttagtcttggaactaagtgtggtgacttgctttacatcacctaggaatagggatgcgtgcttgtagcttatccatgtgttcacttaatgcttaaccctaagaaagttactaagggattagggcttgctagtgggttaaagagatatgtcactgaggagttggtaagtagttgatatatgataaacacaaccattgaataacttagatatttgggtgtagtaaacaatataaattcattggaaggaacattgagtgcgggttgccttaactactatctttacatatcattataatcttaattgattgtttataatacttaatgttcataattaggtttaatttaattgtcatacacacacacaacaacaatttctcataaatatttgtcttccaacctattgatattaattataatttcattggtcaaacaatccttgtgggaacgatacactttcttatcattatattacttggaacgatcggtatacttgcccactttgtgtgaggattatgctgatttttgtaattgccaggaagtcaatcacatgtgccaatcttaagcaaaatcagaagaaaaaccaagctctaaagaaaactctggcgcgaccagtgccaagaacactggagattggtgtcgttctcgccaaagccgcgccactggcgccattagttctggtacctggcgctgttagcaccagaacggcgccaagagcgccattatgtttgttggttagcgccaggagcaccattcattctgtgagttggcacgatcagcactaggctcgcgccatcagcgccacaggtcgacataagttgcataattaaagctgtcaagggaaaaacaaggacttcacaagctgggttataaatactaaaccctcagcattgaatgcacgatttttggagggagaaaagcacacaaatagggtttttaggagcttgggtaccttagctagggttttggggagttgaaggctcaagtggaggttcttctccatcttcttctccttgcacttcagctgggtatgccatttttgtatcacagccaaccacaatgaggtttggctgattttatattgtagttagggccaagcactgaatgtaacctcctttggattgtattggatgctattcttcatttatatcaagttatttcactttactttgattgcatatatgtttttatcttgctggaactgatcactctagctgggtattgaaaactagggtttacaataggaatgttgggattctatgcttggacttgggtaaagtgacaagctttacattgtctagggatagaagtgtatgcttgcaaacatttcatgcatcacttaatgcttaacctaataaatgctactaaggaattatggtgttgaaatgggttaaagggttaaggtcactaagggattaggacttaactatgattgtatgacgatgcatgcattgactaacttgtaatagacgaaggtagtagacaattcatgtaagaaggtaggaagcatttagtgtgggttgccctatctacatttctttacgtatcgttacaatcttaattgcttgtttataatacttaatgttcataattaggtttaatttaattgctacacacaccccacaacaatttctataaataattgtcctccaacctatcgatacaatttgtaatttaattggtcaaacaatcctcatgggaacgatatcttctcttatcattatattacttggaatgattggtatacttgccgaatatgcaacagtagcaccgatatcgacacggtgttttcgatacatacgttctcgatatgtaatttcgacatgttcccgataagtcttagtattaaataatattttttttatatagaattatttcatattaataaaatataataaaaggaaaatcgtaagcacaactactagaaaatgatataaatgatataaataaaatgataatagaaaatggtaatagaaaatgatataaataaaatgatataaaaaatgaaatataaaatgggttgaaatataaaatttggtactatctaaaaataaaattgaaactacttaaaatttaacactacttaaaatttgatactaatttaattttttaattttttaaaatttgaatcgaagtgcaaaagcacagctaacactctagcattcacctcacctcacctcacctcacctcacgcctcacgctcctctctctccctccagtgactccactttcctctctcttcctctaggctcctgttttgttgtctcaatctccttgactccttccacgactccgctctcttttctggctccctcacctctccagtggccagctgcgttggggtcggtctctctccacactcctctccctcatgacctcatttcatggctctgttgagttgagggggagctgaatgaaggtcaagagaaatcaatgttcaagacttggaagttttggctttcaacatgactcaagaaggaagattgaagcttgtaatttaaatgtaaaaggaaaagaaaagcattatgatgatccatgtactgaatgcatatcattcattcatcatacaagcattgcatcatttagaccttaagaaattaatttgttattgaagaaaaagctaagtgttttggaaaaatagcctagaactggtttaatcgattactggcttaaaggaatcgatttttttgttcataaagctttatgaaaaatattacgaacactttaatcgattaccttatcggaataatcgattacatgcttagttgtgatatacagtcattcgagtttaatcgattaccacttcttgtaatcgattatatagttcaaaacaggttttgcatacattctaacttagtcgattacgaatagctgtaatcgattatttaagaacacccagttgatgccttgtcttgcttaatcgattaccatgacttgtaatcgattattttacctaaacatgaaataatggtcagactgatgtaatcgattacactacgggttaatcgattatttgacccatttgctataattctaaaaaccaagagtcggtttaattgattacaggagcgtaggggagcggatttaatcgattaattctgttacgactttttctataaatagaacccttagctttagtgattaagaagagaatagagattaagattgaaaaaaaaatttcgactttctgagcattctaaggtgtcattaaatcttcttctgggttcatattgtcttgctgcatttattcattaatgggatattgagattgtaagtgaagcaagcttgttgagtcacaaaggtttaggaaagcagtctacatcatcaatctgtattcaacctgaggtttttcattcatattctttacattggatcatcaggtgaattctttccttaaaaagctttatgaatgtattgtgttcagcagtaaattttgtattttgtgttttattgtatttgggttttcttgcaagaggggatagtgtttctccaagggagatagggtttctccaaagacagctgagtaggtttctcagtgtgggtttggcttctaaggatctaatagtgttttagatctctgaacttcttcaagggttgaagaagagaagcttgtaattgcttgtaagaaacagaaatgcaatagtggaactatactctagtgttgagtagaagaaactggatgtagcctcataggttttgaggtgaaccagtataaatcttgtttcttggtttatattctgcagttttttttaatccttatgtgtgctttgaggtgtatgtttattcttgtgtgaaatctgtgttgtgtggttgaattggtagcataacaaagtcttggatagatcttggatgaagatgttcaattcgggttcataataaagatcctaagggcattttaaactctgatatttttttaagaaatttttatttactaagattaaccaattcacctcccctcttggttaattgtgagagttcctcatttttaacaattggcatcagagcagggtcttttaagatactcaagattactgcatttttcttaaaatgaacagctcacaaataacctttaaggaagaagcatccttaaacatacctcctttgtttgagggggagcatttcagcttttggaaaaatagaatgaagatctttatccaatccaatgatccaggagcatggaatgctattgagaaaggtcctagagtacctattaagatggtagataacaacatgattcccaaagattgggatgagccgaatgatgatgaaaaaagaattgttcaatatgactttaaagtaaagaacatgataacttctgctctatcttctgatgaatttttcagaaccgttcgatgtgcaaatgctaaggagatgtgggagatgttggagatcacccatgaaggaactgaggaagtaagaaggtcaagaaagcattctttgattcatgaatatgaaatgttcaagatgaatcaaaatgagagtatttctcagcttcaaacaagattcacacacatagtgaatcatctccttggacttggcaaaacttttgatgctgaagaactcaacatcaaaattctgaaatgtctcactagagcatggcaacccaaagttacagctatcaaagaatcaaaggatttatcaaagatgtcaatggctgcactttttggtaagttgcttgaatatgaatttgaattatctcagctaacctttggtgaagatgcagataggaaaaacaaaggaattgcattgaaatctgcaacacccaaggacgaaaaggatgaggactctagtgaagaagaggaagatgaaagcttgaacttgatggtgaaaaagttcagcaagtttatgaagaaaaacaagggcagaaaattttcaaggaacaacaagagcaattcctcaaacaacaacacaagcagcttcaagaaattggacagtagctatacttgctttgaatgtggcaaacctggtcacattaagtctgagtgctccatatacttgaagaaacaacagcaggacagcaaagggaagaaggaattcaaaccaagaaaagcatatattgcatggaaagacaatgactcctctaccactgaatcttctgctgagttagaagaagcaaacatgtgtcttacctctatcatcaacgaagaaaatgatgatttactggatgaagatgaagaggtaacttctgaacttgaacaagctattttagcatttcaagagatgcacaaagaagctaaaaagatggctaaagcaaatagcaagattaaaaagaacatagaggaacatcttgccaaaataatggagcttgaaacagaggtttgtaatctgaagaaagaaaatgaaaatctgacttcaaattacaaatcaaatggttgtatgtgaacatcttcatctacatcaagtgacaagtatgaggtattgcaaaagatatttgatgaatatagattcaatcaagaagaaaaatatttacagcaagtgtcaaagaatcaagaattaattgatatcttggaaaagctcaacaagggaaaatgtgatttagatgaaatgttgagtgcccaaaaatagtatggtgatacctctggtttgggatataaaaagaacattaaaaatatgcagaaaaataagtttgttctcccaaagcagcatcaaaagaaaaaggcaagagttaatcaaagaagattttcgagaaaaagatacaatgctgtaacttgtcactattgtatgagaagaggccatacagcttttcattgttttgcaagaagattctatgtcccaaatggtgagtgcatttgggtagaaaagaaaaagaaaattgctaacccatatggacccaaaaaatgggtacctattacttcgaagtaatttgtctcttttgtaggtgtgtctaagagcaagctcatctatttggtaccttgatagtggatgctcaagacacatgacgggtgacatgtctctgctcaagaatgttacatttaaggaaggaggctttgtcacgtatggagacaacaacaaaggaaagattatgggagaaggaagcattggtgacagcttaaacaccaagattagcaatgtcctatatgtggaagggttgaaacataatttgctgagcattagccaattatgtgataaaggctacaagatatccttcagccaagactggtgtttgatttgtgacagcaaaactgatgaggtaattcatataggcaagaggaaaggtaatgtgtatctactctcaattgaccatgctttgtttcacaaaactatatgattattaagtaaaatggatgaaacatggctgtggcataggagagctagtcatataaatatgcatcatatgaataagctaattaagaaggacttagttattggcttgcctagactcaaatttgagaaagacaaactgtgtgatgcatgtcaaaaggggaaacaaacaaaaatctcttttaaaagtaaaaacattgtttccacctctagacctcttgagcttttacacatggatttttttggtccttctagaactatgagtataggaggcaattactatggacttgtcattgttgatgatttctccagatttacatggactttgtttttgaaatccaagagtgatgcttttcaatcctttcgaaaattagccaaagttattcaaaatgaaaaaggatgtaaaattgtttcaattagaagtgatcatggtggagaattccaaaatgaagattttgaaaaattctgtgatgaatatggaataatccacaacttttcagctccaagaacacctcaacaaaatggtgttgtggagaggaaaaacagatcatttgaagaaggtgctagaacacttctaaatgaaacaagtttaccaaaatatttttgggctgatgctataaacacagtttgttacaccttaaacagattactcataaggcttattttgaagaaaactccttatgagctgtacaaatgaagaaagcctaatgtttctcacttaagaacctttggctgtaaatgctttgttttaaataatggaaaggaatcacttggaaagtttgatgcaaaagctgatgaggctatctttcttggatattcattacaaagcaaggcatatagagtttttaataaaagaaccatgtgcattgaggaatcagttaatgtaatatgtgatgaatctaatccctcaaaagaggaaaaagtttatgatgatgatgcagaaaatgaagggcaaaatctgaaatttgaaaagatgtctatcaatgaagagaatgaaccgaagactgaagaaagttcatcaacatcaagacaattgcctaaagaatggagaaccacaagggatctttcactagataacattattggtgaagtttcaaagggagtctttactagatcctcaattagaaatttgtgctgtgacatggcttttgtttctcaaattgatccaaaagatatcaatcatgctttgcaagatgaataatataaagattagacatcactttataagagatcatgtgcaaaaaggtaatattaaggtagaatttattgatacacatcatcaacttgctgacatatttactaaacctctgcctaaggatagattttatactcttagaaacatgctaggaattcttgatgaacacaacatatgttagcatgtttatgatatgatttactgtcatcatcactgctaaatcattatgaaaactgcaataacctcacaatgctctgatttcatgtaatcaaagtataatgcttgaaatatgctctgttcactagaatcaaaaactgtttgaacttgttaaaaagctctgttttctgttattcatactaaaataatcgattgagtatcggaataatcggttattttcattaaaatcacaactctatttcaaagtcaaagtcatataatcgattacataggaatcgtaatcgattactcttcataagtcataaatggtgtcactctggagtaatcgattaactattaatataatcgattacaagcttgaagaattaatcctgaaaagataaaggacactggactaatcgattactcatcgggataatcgattataattttactgacttagcataggaaatctaggacactctggaagaatcgattaaaatcggtgttaatcgattaaaatgttcttagctagcttggacctttatccatggccaaataatcgattacatttggagattaatcgattacatatcgttttcaacctctagccatcaatcttactatgaaaatctcttgaaattcctccgcaattaatcgattactaataaatataatcgattattacgactgttgtctgattttctgtaatattaatgggcagttacaactgaccaattaaaattgtgtatacaactccccacacattgaaagcctctcaacagttatgtctcttgaaaatatgtacgttcaacagacaaaaaattctataaatagatgcaatctggcttagaaaatgtcacaccaaatctttctttcatctctaatttagtcatgattcaattttcttctgaaaagatcaagctgtctcagagaaagcctggagaactctcttttgcatagattttaaggctgagaccatgctgatgctttaagaataatataaggctaagcctcatgaagccttgaaagtcattagagagtggatgacagatggattttaggcttcattagttcttgtctgatctgctttctgagataaagtagatcaagactctgtccaatctctgtccaggattagataaatttggatcttttccagatttgctctatatatgtaatatagatttagtatttgtctgatctgctttctatttgtaaattctcagtttatattaataaaatcagaatttcagtttcagttctatactctgtttttctattttttatttcaacatcttaatgtactcttctgtctctataaatggaatatatgctttctgttcatcacttatctactgtgatttcattttttgactttaaaaagccaaatagggggagaaaaattgaaaatcaaacatgaaatgcaagtgctctgcatcatactctgttcacctctgtttttcatgtcattttttagtcaaaatttcatatgcataaaatgtgaaattaaggaggagttaagggtcaaaactaattgctatatgttagaaatgcataatgaatagagctcagatacgtttaacacttgttcttggaaagaattattggaattttaggtatcaagaaaagtacaggaacatgaaaagctttttcattcaatcacaaagacccattgcttttcaattgaaaatttggcatgtttaaagccaaaaagggggagaatgttgagttgagggggagctgaatgaaggtcaagagaaatcaaagttcaagacttgatagttttggctttcaacatgactcaagaaggaagattgaagcttgtaatttaaatgtaaaaggaaaagaaaagcattatgatgatccatgtactgaatgcatatcattcattcatcatacaagcattgcatcatttagaacttaagaaattaatttgttattgaagaaaaagctaagtgttttggaaaaatagcctagaactggtttaatcgattactggcttaaaggaatcgattattttgttcataaagctttatgaaaaatattacgaacactttaatcgattaccttatcggaataatcgattacatgcttagttgtgatatacagtcattcgagtttaatcgattaccacttcttgtaatcgattatatagttcaaaacaggttttgcatacattctaacttagtcgattacgaatagttgtaatcgattatttaagaacacccagttgatgccgtgtctggcttaatcgattaccatgacttgtaatcgattattttacctaaacatgcaataatgctcagactgatgtaatcgattacactacgggttaatcgattatttgacccgtttgctataattctaaaaaccaagaatcggtttaatcgattacaggagcgtaggggagcggatttaatcgattaattctgttacgactttttctataaatagaacccttagctttagtgattaagaagagaacagagattaagattgaaaaaaaaattttgactttctgagcattctaaggtgtcattaaatcttcttttgggttcatattgtcttgcttcatttattcattaatgggatattgagattgtaagtgaagcaagcttgttgagtcacaaaggtttaggaaagcagtctacatcatcaatctgtattcaacctgaggtttttcattcatattctttacattggatcatcaggtgaattctttccttaaaaagctttgtgaatgtattgtgttcagcagtaaattctgtattttgtgttttattgtatttgggttttcttgcaagaggggatagtgtttctccaagggagatagggtttctccaaagacagctgagtaggtttctcagtgtgggtttggcttctaaggatctaatagtgttttagatctctgaacttcttcaagggttgaagaagagaagcttgtaattgcttgtaagaaacagaaatgcaatagtggaactctactctagtgttgagtagaagaaactggatgtagcctcataggttttgaggtgaaccagtataaatcttggttcttggtttatattctgcagtttttttttaatccttgtgtgtgctttgagttgtatgtttattcttgtgtgaaatctgtgttgtgtggttgaattggtagcataacaaagtcttggattgatcttggatgaagatgttcaattcgggttcataataaagatcctaagggcattttaaactctgatatttttttaagaaatttttatttactaagattaaccaattcaccccccctcttggttaattgtgagagttccttatttttaacaggctcacgatcatgggtcagtgactcagtggtcacgtcgtcagcccatgcccgtccgccatggcctctccgatacggtgtgtgacggggtgcgagcggcgtgcgatgggaagtgatcggccatgaatcggccacaaccctttgacaatttttgaccattggatacgcgaatttgcgtatcgaccatgaatccgtataggacatgtgtccaatatggtgattattttttgcatgtatcacataggttttattccccacataaggagtataggaagttatcaacaatccagttttttggaaatctatacacaactttaaacaaacagagcccatatgcaggatcagctaaatttttttaaagagattaggatatggacattctaattcagaatctagcttacacattataccacctttctttcaaattattagaacacaaacctctacataatctaaagaaaaacaagaaacaatgggtaagaacacagccaattacccaaattagtattaagaatgataagcttgatgcattctcactagtcaagactgaaatcgggacttcctttatcagacagaccataatccgggtctcatggaagtttgatatttgtgtcagagaacattgtgaaacccttcgactctgatgatgaaaccaccacctctattctactctgatcctgtgcatctatatatgattctctttcttctagttctttatcattcatttcaccattcagggcattggtgacaactgcaaatcaatacattcagattcattcctaatagtaatatgtaaaggccactttgatttgagcatttcaattacttaccagtcttgcaaatattcagggattcaattagtagtaagggaaatcaaacctccacatattgggatatacctttcagaaacattccttcacctaaattcatccttgcatgaaacacataagtgatgacctgcacatccacggagtagtataatacaatttactacaacactattaaccaaaaaagaaaaagctcatatatgttgtagcagagaattttaaatggctagtggttaaatggtatgcaacattttccaattaatattttacctggggagcacactagaaagatcagtaataagaggttcagatgagtttgatttatgttgttgaccatttatatctctctgtcctattgtacccaatgaaaagccttctgattaagaattcagttattgagaaattgtcactatcttgtcaattaagtcaaaagttccatgtagctcttggtttcatagttgaatttagatccatgggtaggtacagtttctctagctcaatctatgatatctgaaacatgaatttcactctgacctcattctactcaataatagtacattgaacaaaatataccaaaacactttcaacattgacagaaaatgcaataagaagaaacaaccaccactatgcatgcgttgatatattaagaaagttaaaatacaacgacaatgatgagtgacattgtcaaactagaagagaagaactgaacataagaacatgcgaaaagatagcaacataagagcacacaacataaattggcagatgggaagtgtattttcattctcttgtttccagcttacatagagtgacttacatttggtgaaaatacaaagtcacaagcaaaatgtacaactactgttgacatggcttacccacttccttaaaacatggtttttcacccaattccacctactacaagatgactaaattgatatatatatatatatatataaaaggacagaagcataaatggaaaagtaggaatagaatacaaaattcacatggctagttaatgcatgcagaaatgtaaatttagaacatacataaagcaaaaatctcaagcgcgacaagctgttgggatgagagggagtagatgagaaaagaagatttcagttatagaaacaaaacatgcaatatgagaaaataagattttatttctcaaaagagattgcaaagatagaatgctggactcagaggtatacctagggagaactctctgagaaggaaactaaaaaacttgcctgaagattacgggacgcagcccttaaatagatacaaaaaccctgtctctatagttcaggtgacaaaaaccggaaaatctactgctatagtgaacagttccgcacaatagtctgctgcaggggatggataatgtgatgttgatgtcaagcttatgtcattcatcatccagattaatcccaaaacagtcgtcttcattctggtagaagtcgtctgaggattgagaggaggcttcggaggggtcttcaatcggctttttggatgaagaactggcatcttcattctccttctccaaaagattaaagataatcttcatcttctcaaaggcaccttgcatcaaaacaaatttttgctagatggcaagctattttgagtatctttgattttgatattgaattcctcaaaggtaccttaaactctcttcctgattatcttacccgtgaatatttacaggggagacaacagttgtagtataatgccagattcagtcaaatcttcctcctcacgagggagaggcagaggcaagagttcaaaaccatgactatctgtagctggtttaatcgcccattcaaggtctggattttcgtctaaacaggaagaaggtcccaaaaaccaatcaaaatttgggtcacctacccagtctgggtcatcaacccaaaaatctgaacctcaatccattactgagtctgtcactcagtaatatagacaataatgaaggaagagtaaggattaaaaatgtcattcataattttctggaattctgaaggagcattttttaatccaaaaggcatgactctccattcatattatccaaaaggggccataaaagctgttttataacaatccctttcactgatttgaatttgctaaaatcctgattgcatatcaaactttgaaaagatattagcagaaaaaagacgattgagaagatccttcttattcagaatcggataacggatccactgaagggcttgattgagcggtttatagttgataaccagacgaggagatccgcgctcaatttcagctggtttgttgacataaaaagcagaacaagaccaaggacttttgctttttctgattaatcctttttgcagaaggtcttggatttccttctggcaatggacaaggagttattgaatcatctggatgggtcgagccttgatggggatttgacgatcgttgaagtccttctcataagggagatcaacaatatgttgtttcctcttccagaaagcattcggaagatcagcacatataaagttttggatttggttagacaaggattggacacgactttggatatcgggttgattaagcaaatcatcaattttcttataagaaatctcttctctaagataattgatttgattttgctcaaaaaggattgggttcaagtttctaacaataggatcttttagaaacctgaaagtaatggatttattcaaataagtagtggaaatacccttatctgaaatggttatagggaagatggatttgataaaaggtgttcccaaaataaccgcatttttaagattcttgaccaaaagaaaagaagttttaactttaaaatcatccttttctatgaaagcgtcagaaagtttgaagttaacgcgaagcttagatccactggcagtactaagtcgctaagaagttttttcaaaatactttgttggaattagtccttcctgaatgcagtttgaatctgcccctgtgtcaaatagagcttcagtcttaaggataaaggttccaacaataattttgaccttaatataaaatttttgaattgttatctggtttattaattcaaaaatcttgggaggaatattaggactaattgaatcatctggaaaatcattatcagaagtttgattattttgaataggttctttctcatcagttggatcaccatgttgcagaacactcaaaatgttcttatgaacattttgttgttctttaataaggcgaatttcaattttcagtggattaacctcatgatgaaggtcctgaagggttacaggtttaacaatactcttatcaaacttcctaagagtatctttaagattaaacttattattaattaataaattgttagttttagaagatgaagaagatggttcatcaaaagattttttaagtttaagcaaaagatttttcttttctacaggatcaaaaatggaattaatcacctcaaaaagaagatcttgctcccggatttgggaggaagaaggacagtcttcatcagtcgaagataaatcatcatcttgaatttgatttagattttctgaagagtgatcttcagaagtatccttatcagattcttcttctttggaggattctactatgagctgattaatttgttcttcaacagagggttctagattaaggttcctaagcttcttcttaagcctgcaatattgactcttatggccaggtttgccacaagtccaacagactataggtttcttaggaatgttgaccttatcaaagggaggtttggtctggaattctctcctaagatttctaggtggggttcctaacttgtgacaatgataaatagatttcttaggtttctacctatcaggattatgctttttgggtttcctgggcttggaacaaggaaggccaaactgctcacagaaattacccaaatctctacgattttgagccttttctttggcaagctgatactggatcttatcatcttgacaaattttcaaggctaccttctggatgtaagcaataagttgaccatagcttaattgcttatatgggatctcattgttagggtgctgactacagatcttatccctaaccttatcccctaaggattttggaagaccaacaagaaacttttctttccaaaaaggctcttagttgtcttcacggttaaagactctagtgaggaaggtatccttataccacctaaagtcagctagggtcttacacctaagattggaaagcagttcgacagatctatccttccaaagactggaatcacctatgaaatgctgaactatggtgaagtttaactggttgacagaatcaggaattggcttaccatcttgggtcaggattgtgccatcattttccatcttgatagcactctagatggtaatcttatgttcctcgaaaagataattatcccaccaaccttttagttgtcaagtaaaaccagacactaaaatatttacaataactgcttccatgcagttaagggatgtatcatatgttgtagcaaccatggtcatctgctggaggatgttgaggatttggtattccgttatggcatctatgttccactcatatatgtggttggcattaaaggatttggagttttccctttcttccaggagaagatcgggagcggtcgccctatggtaatacaacttatagggttgcttccagttggtctgattcctaatagggttagtttgggcagatttatttgagtcggagtttccattttctgacccagcttggttaaggacattgatttccttatctttgtccttttgggctttatgcctagatctagctctagtaagggttggtctagaatgggcttcttgcgaggtttgaggagtatcttgaataataatggatgttaatccttcaaatttctccttagactcttcaaaaggttgattaaaagctttgagtttatcaaactctttcctaagcttatctgtcattctaaaaggtttgaaggtaaggctctgaatggttttaggagcagaggtactagcttctggacattcaagtagaattcgaaataccgaaccggaaatccaattcttctcttgcttgagttagatccttggattgattagtgatttagccttccatgatgatcaccaaggaaagccccatgaaatgagtgcagaaaaatggaagaatagcaaaatgaaaatgaagaagatgaagaacaatgaagaacacttgagagaaaatgaagaacaagcttttgattctaaaaactaaagaaaagaaatgtaaaacttgtttattgaattgtaagtgtgttgtccaagttttcactaaagtcactaatatattatcatttcattgatacataaatgtactcacccattcaaatatttcatcgaatcattgataaatggattccatttgtcctgtccctaaaccaaattcttattttattttgaaattcttttcaaaagttctgaaaataaaatgggccacaaacaaacccaacaatctaattatttgctatttacaatcatgaaagtcaaattcgcagcccaaaattacaagtgcagaggtgctaacttcaaagcttaaaataaccctctaaattacataattggcctcgagctatttctagaaaacttgtatatcttttcgttatctttctagggactcctagaacgctccattcagagatcggtagcaccctataggtcctacacaagtcaaatacatcaagtgagccaaaaatccaaaaatacgcaacaattagcaattacgcccacttacttgcctaagccaaaaactgaattagaataggaaaataaaggtccaagagaggtcaaataagctaagaaggatagaaaaatactcaactaaaagcactctattagttctatggatggttaacaaccaaaaaggatttttgtccatgacatagagttaaactgaagtcctgcaggaaacacataatcatagagcaaacatcaaacactatgaaacagaataaccttgtcaatgtcatcctaatacaacaaagatacctttaacaggataagtatctagagcaatgcaattccataatttaccttaataagttcttcttgcatttcaaagaactccaattgcctcctcctctctgagacagaatcttcagagggcaaagatgtaacatgtatagtatctacaacctcaccagggagagaagaaagtatagcctatacaacatattgaagttaaacaagattaagaaacaaacttgcttatattatctacaataagttcatcattaaacaacttagcaaagcccaaaatttcctcattagagacagttgcacccaaaatttccccaaaattaagctactttgatacaattcaggagtcaagcttggcagaaattttggcaacataaaaaaagaaactgggacattcgtaagtcagccaaacagatagagtgatagacaatttgaaatttaatagttaagaatgaagactgaatactagttaaaaaaggtctaggtgcatcaggtcaactaagaatgtaatatacataactaatattcttaggctgaagacagtaagcatcaaaacaaatcaaggcaaaaagattatttcctccacgtgcttatagttaaagatttattttatgcatcataatcatttgtaagttgtaacatctttcttctttcacgatacaagtaaatgtgtatccaaatttactgtatgtgcttgtatctcattcacaacaaatgtccagtgaaaaaattatgaagaagcaaaaattagtcacatttatatagaaaaaaattaatacttggttcatgatattatactttgtatcatcttagacaaacaatggcaactaagaagcagaaaaaatgagtctttcaaatttctaagtacaagtggtttttcaagccttcccatgatttttccttaaatccaagaattcaaacatatcagcatgccatggctccaagtacacagcaaatgcacctaaaagaagattataattgtacatacaggtaagaaaagaaacttacaaggatccatgaaacataggaattgcttataaataatctactttactcttgcctcccccctgaccaacatagcgggcagtatcattgaacacatttaacattggaacaatgccattggacgttccatttgtcccatgaatataactgcctgtagcatgaatgtcatgaatataattgcctacttggaaatttcattattacaaggtttgccactatgaaacaccaattttttaggatttctaatgaacaattacaataatttatatttattttatttcaaaggattattttttgaattgatttaatctgtacaattaatttgaattaactattttataatggacaaggtagagagttaaatacttttcctatgtgtgtgaatgtgaaaatgtacaaggcaaagttgtaagagaaagtggggtttgcctaggtactctgccatgagagatggtccagatcacatgccaaactttaagaataagtatagtggggtttgcctaggtactctgccatgagagatggtccaaatcacatgccaaactttaaaaataagtactctaccataaaaaaataagcaacaatgttcaaattcaagtatatatactagagttttcaccagccaaagtaaagaaaagtagaaaaagaaaatatgcttacatttctgaaaagaggatccaacaagcccttaccattagaagtacctataactctaatatttggaaatttctaagagaagggcttcaaggtcttcaaatggcagtgatcatcaaggttttgagtaatgagtacgcaactgatttctggaagatcgactgagctacactatagaagaagcacacaggatatatcaaggtcatgcatttccacaaggtaaagttacatgacaacacaaaagcataataaaagaggtaatcacaatcacaagcaactagctagcatccatcaaaacatacctgaaacttttgtagcactttcttagcagcatcatatagctaaggaattccaaaatccaagttgcccaccaaaattggatcaaccaatatgtttgtcccacccacattccagatccaactgtttccttaaattcaacatttcacccataagaggagagtggaaagcaacaaacctcaacaagcgaagattttgcttagcttgagaaaacattttatatttcgattccccactttcataaataattacaaaaatatcacattgtttttcgcactttatccaagacttgatcaactcgtgcttgatgcctcaacaagaaggggtgtaagtggtttgcatatatttgttttgcaccctgtttaaacaaaattagtttattagcaaaataaaagaacagtgttgaggcattaaagagccaaattgtcaatgtataaacaaggaagacaatttagtgatataaataacaagaagcaaatgcaaaatagaaagatggtggataaaaaattgctaataacttaaaaggggaaattcctaggagaatcacgaggcatgtgtacaaaaaaatttgaactttgtacatgtacccaaattcacacttatgatagtttataggattacatttacctctcctcctccagcatgttctttaccctcttctttggcgaccatgtctctctaccgtacacgtcaatgactttcatagaaataacaacaacacacatgaaactcaataaaaaagagaattgttagatctgagaattgatgcaaaaatagaaaacttcaagaaacagatctaaattagaccacaaaaaaaccaaacttgaagcaccacaaaatcagtggcactcaccaaagcggtaaagccaaacaccaacaaaacaaaactccacccaccgccacagtcacaaccaccaccaacaatggctcgcctccactgccttcgaacccgaatcgacaacataacactccactccgtactcgacctcagtgcttctgcagacaccttcgacgacatcgacaaagtcatcatgatgaaggcataacttgaccactgctacaacccgcctgcaacgagttactcttttgtgttgttgtcacgatgaaacataggggtattctggtggtcgtgttctggatttggatcgcagctggaaagatggtagtaagaccatgagatcagggtttcttctttagtgaagagacattgtggtagggcgtcgtcttagggcacagttgattaaaaattgacagtgtttttgaatttcgaaaaacaaagacaattcactatgaaatcggcatttttttgacgtttcaacctcgtttccatcataatactacgacattttatgtacaatcgtcattgtacttgtgtcgtaaaaggcacggtgtagtagtgaatatactccaactcatgggatcaacataagtcacatggagattccaaatcagataacactcccaaggccaaagttatactttctctcatttcatggccttctcgattaagctcaaacatcccttgaaaaaccttacatcatataatggatgaggcatacaagacattcatgaaattttcatacatatcatcacatggtggtccctgccccaggccacatacttgtcatttaaaaatactatcatgaaatcacttgatccacattatcaactagatacatcatactctcataagaggcatataagctaacaatcatatacacacatacacctacttgcctaacacaacatgtagtcactttttctcctatgctctatgaccttatttagacttctatgttgacctaaaaataagcttttttcatctactatgcttgaaattattaagatcacaaacttatcacataatttcactaatttgatatatattgagttctacacattatttttggatgaaactaaattcgttagttagctaacatatagggctacaactttcatgcaaactatttttcctatttctatcattaagttcaccagcaaatttccccttgcccagtgaaaattgcattcgcccagggaaatctgcaagtagttcacgttgtttttatatcaattttgccccaaatttttttgtattttccaacaaaagttgtcttacagagagttatggttttgcatttgtttgcattacatgttcccaagggttcctaaaacttcaaaacatgctctaagtatacaagactaaaaaatgaaaccataccaattatagcagaatacataaattagtcataggaaacatcatttaaatgcatccaacacaatttcacacaattcaattcaatggacaaaaaatgggtaaaaacccaagaacaacaagacaaccaaattgtcaatccattaccaaattaaaatgctttgtgtgttcacaacctatccaatccaaggaaaaaaaaagggatgaactttaccctaaagaagagaaacacaaaccatacactccttcaatctcaattcatgtctttgatggggctctatgcaataatctttttgtttcctctacaatggcaccaaactgagaagaaataagaaaaaggaaagaagaaagaggtttagggtttaaacttggggagaaaagaaaaatagaggttagagacttaactaaaggttatgaaaaaagctcatgggccacaagcccacaattaatgccgaactcttggctcataaaactcttcatttcttgctcactacataaaacctattttcaactccaattataattccaaaatatcacttattcaattaattattgaaaacatttacaaatgcttatattatttaaatcaagataaaatataatagcaatttacgtaaataaattttgaggtgctacactcctttcaacattgtcactaaaatatggaatgtgttttcattttcttattgtaacactaaataaaattatgcaaaaataattgatgagataaaatggtagattgagtcctattgttgtttgtggatgaaaatcactttttccctccaattagagaactccaaatcaaataaaaatgacacctcaattttatcttacatatggagaacattaacattgtttgtgttttatctttgcttcacttcgatccaatcaattcaacacatctccgatttcaaaatctagacaattctcaaaactcattttatttttacttgttgtgtacttgatctacttaatgtgaattcttgaacaaacggttggattaaataatctaggagtaagatatattaaaggttaaacacaactttggccccctatttagcgtaacccacaaattttgtccaatcttcaattttgtatacacttatttcatttattaatttcttacattagttaaatcatttcttgattattacttatatggatatgttaggtttaagattcaattataccaaaataaaataaataaaacatagggaaaattgaatatttgaccaaaaaaccgattttcaaaaataaaggaccaaatgtctcaattttgaaacagagagaccaaaattgaagattggacaaaatagggggaccaaattaaagttgtgtttaagccttatatttaatagtcctctttgacttgacaaacctcataaccttatttttctttgagtcctataaaataaataaaacatagggaaaattgaatatttgaccaaaaaaccgattttcaaaaataaaggaccaaatgtctcaattttgaaacagagagaccaaaattgaagattggacaaaatagggggaccaaattaaagttatgtttaagccttatatttaatagtcctctttgacttgacaaacctcataaccttatttttctttgagtcctcaatctttgttcatatcaccttaatcgtgttgaggaactcgcttacaaatggttacatcgttgtagttggttccataattacaaaaattatggttaaataccatgatgttatccttcctcatgcttgcaacataaagcttgcacacatacattcaaacaccacaacacaaagagactaaaccaaatgagagaaagcaataagttacctagagacaatgacatatgaggcaagttcgatgtcatgaattttgaaactagagaaggagatgaagctaattaggacctaaaggtcacggggttgaaagacaaagatatgcaaagataacgaacaaaagaaagaaaaggaggagccttttggtttccatgactacaagaaagaagtaagggtaaaagctttaaagagcgaaggttgaggttttggactcttgcgacaacaatgagagttggaaggggaaggattttttttcttatctaatttttttctaacctccggtctaaaaaaatgttgactttgatagtgacatttattaatgtcatttaattagcaatatatttattgtcatggaatgcgattttcattttaaaagtataggaataaataaaaatacacaaacataattgatgatataaatggtatattaattgaatcctactatagattgtggacaaaaatcagttgtctcctccaattagagagtgctacgtaatgtcacctcaatgctacattacatttggagaaaattaatgtttttatgtcctttcaccgcttcactttgatccaaccaatccaacatttctttcatttcaaaatatgacaaattcttagaagctttaccattttccttaattcgtgcccactactaaatggatcacaacccttatttcctctcccgaccttggattttttcctttttttcaaaataaattattttaaaacatttaattataggcattaatagtaggggaatgagatctaaaagggtaagtgtaggggggctattgtagcaacaattagagttggaagggaaatgattttttccctatctaattattttctaaactagttcccttggttcgaaaaaagtgttgactttgatagtgacatttgtttctatcatttaattagtaatatatattaatttatagaatgtgttttcattttaatatagtgtagcaagaaataaaaatatacaaaaataattgatgatataaatggcacattaattgaatcatattgcagtttgtggaaaaaaatcatttgtcacctccaattagagagcaccacatcaattaaaaatgtcaccttaattttatgttacatttagagaaaattagcatcatttgtgttttgtcttgtctcgacttcactttaatccaaccaattcaaagcgtctttgatttcaaaatttaaacaacattttcataagcttaaccatttcccgtaatttgtgtccaccgcaaactagatcacaacccatcctctcttgaccttcagttttttcatttttttaaagtaaattaatttaaatattttctttgtactattttttttattgtattgaattttattatctaatctaattgttgaattggtttctatatttacctattggtatcagtacgagctatacatgcatcatttcaactatagtctactcattttctttttaactctagcaatagtacaaatttgtcaatgggaaacaacatgaatcacaaacaccatcatcatgaaaaccaagaagacaatggcgaatatgtcgaaaaagtattggattggttggattcaaaatgaaatagagacgatatacaaatatggtaatcttttaaaaacctattatataatttatcagtggaatttttattaattgatgtgactcactctaatcaaaaggaacaaggatcgaggacatgattggaaacaagtgaatttcgtttgcagtctgttctctagtttttttttttcagatcttcattaacttaattaattatacggtattagttcttataaactccattctggcttagtaaataaacaatcaagccaaatagaaaaaattatatattttaaaggtagttcaaagagagagagaaggaaaatgaaaaaggcattccaaagcattcaacacatcataaattaaggtatatggactgaatgatcactaaaagccaaggcactgcagttgcaaattaagaaaaaaaaataaagctaaaagacggtgaaaaaatagaagaacaaaaaaacaaaagttggcacaaaaagcctaacttctcaaacaaacacactttgagtttgatcagagtgatcttattaacgccaagtgccaagactgattcaaccatgatgacgaaacaaacaacttctaagcattcttcatacccaagtgatttagtgtttgagtttgaggcacggtgtgcttacgatgaaagttgcggtggcaaccacaacaagaacataggagaccatcatcaccgatgagatactcaagacaaccatcatggctgactcggccaagtgttgctgcatggttgtacagacactccttgtaggtcaccacctcacctgttggtaatgactggttggtgttgatatcagacatggtgaaattaaggagtgaatgaatggatgcttgtgcatttggtttgagggagagaggcttaaatagaatggtgatggaggaacaaaagtgtacgtgtccacttggaatatggtcttgatgcatgttgtgacaggtctccatcatttgaattctaaaacgtgtcttcttacaccatatctatttaccatgttataaaagtaagtcctccatatgtctaacatttcccattccaagtgtcagtattttagaaattaatactaaatgtttttaacctttgcttaaatctttgtcttaattactttctttttggttttgtcccttttaaaaattttctttctttctttttatatttgtttctttcttctattcttatagtttttttaatattttattctctctctctaaaagaaaacttttatattttgaaggtagtttaaagagagagaaggaatatgaaaaatgcattccaaaatatacaacacatataagaaattaaggtaaatggactcaatgatccctagaagccaaggcaatgcagttacatattaatagaaaaaataaagctaaaagacggggaaaaacaaaaacaaaaagaaggagaaaaacacaagttggcacaaaaatcctaacttcctgaacaaacgcactttgagtttgattagagtgatcatattaatgtcaagtgctaagactgattcaatcatgactatgaaactaacaacttctaaacattctttatacgctaagttatcttatttttttagttttttttcttttgttttcttcaacagtttatactttttatatatgagaaatttggttatacatttatagtataaaataattttatatcgtcaatcttatcacaaattttcttatatgataactttattaacttttataataaccagcttaaagttatagaaagtgttgtttttaattggttgacaatgagggactgatttatgattttatttttaatatataataataataatatattcatattagaaaagtattataaatttatattttggaatcaaatattgatatttaagtttcacttatttttcttattttttacaacacaatttattatcgtttcttgttacgattgttaagataatgacaatctttcaccatttataataaatatatattatttagttttattatagagataattatcattttaaataaatcttttgaatatcatttattttcgtaattagtattttccttatatcacccatttttatgagatgtaaataattacatttacaaaactttattagtattctctttatattgtactattatatttttattataaatgattttagaataaaaaactatttattaatccttcccaatgtggtaagcttaattacgagcattataaaaaggaacggttgtttgaggtttaaaatacactaacaaaaattctctgtttccttcactagttctacgtatattcattttgtttttcttctcgtctttattttttaggacattgattatgattctcaaacgtgtttttaggctcgtgtttataagtctaaatatgtcactatataaaccttgagaaagtttcacgttatatccttcaaaatttgcttttaatgtgtgattattatcaatttgaaaacatattctttttcaatgattttgagctatcattatatggtgaatactataattcattctaatttaacaatttttagaatattatgattaggaaactttcttaacttttttcgtattaacactactaaaaaactgactttttacaatgatagtaaaggtcttttaacgatggttatataattatttttggagtggacgttgtaaaaagtcaatattttgtacatcgattttcaaatcaatcttagaaatgttattttttaaattaaaataaataggtgtttttaagatgattattatgaaaaattgtcttagaacatcaaatttctaagacagttttctagagatcttagaattttttttaaaaaaataaaaataaaaaattgacgattctaagacgattttttactaaaatcattttagaatgtgtattttttaagacaatttttaagaaaaccgtcgtagaatgtttttctaaaaaaattaaaaaaagtgaagattttaaaacggttgtatgcaaaaaatcgttttaaatgtaaactttctaagatgattttagagactttcttaaatttttttagaaaagtaattaaaaattgaaaacttcatctaaagtcttttttaagcttttaaatttcattagagtccaagggtgaatgtaattggaagtgtagttaagaattgtaattttaattacaattttaaaagaactaatatctatatattaagaatcataattcttaaattttgattgtagaaaatattaaagtataacttttatatttgaaatccatttttacacctctaattggtcaagggtaaggtttgttgaaaaataaagtcccattggtgtgtaatgagtcaacacaagtgaataataaagggtgaatacaaaatagctctgacatataaataaagggtgagatggtctaactgacggttatatttaatttgtgatgactcatttaatttgcacgcatatattaatgggtttttattaattcaataaatgatcatttattgacttttggtaactttttcttcaacttaattgcatcttacggtcaagttatatctcattttttatgtgtatatatagaaggattaagttacataaaaaataatgctaaaaaaattattttttatttttattattcattttttaaaaatttaatcgttataatgagtaattgatcttaattattagattttaagaaaatatataagatgatttattcttgttctaacttgaaccctctccctctctatataaatttttctaaactgtgcaaataagcctcattaattatccactattcaattaactaattgttatgatttaaaaaagtgattttctctttgctattcctttttcagacgcatgttgatataatctctctttctagcaatgaaataattaattaatacataatcacggcctctggaaactgtccaacttaaatagaagaatattctatttgaaccattttttgttggcacattagtgtgatattttccccgctgcaacaatgcatatgaaaatgaaagttctccttcacagcttcacacattcaatgaacatatgccaaatagcttggaaaagtcacaatcatttagtgtagattttataacatcgggacttcttcatcaaagactttttgcaagttccaaaacaacttggttaataaccttgtactttagttgtagttcgattgatgaagactattttggtggagtgaaacgattgtacagttttcaaagaaggtaaatatgtattaattaattattattttattggtaggaagagaaagattatgtaaataaataagatagagaaaatcacattttttaacaaatcacaataattagttagttgaaaagtgaataattaataagatttatcctttgtaaaattgcacaaattaaaaaaattatatatatatatatatatatatatatatatatatataccagtatttatatccatgcagtgtataggagtcaaattggtatactattgttttgtgaaagtattaatattaaataggtaaatagttatttccgttcttgaatgtatagactactgataaatttgtctcaaagataaaaatttaaatttttgtttctcaaagtgaaaaaagtgtgacaaatttatcctttaattaacatccgtgcgttgcagttaatatccagagacaaatttatcaacgctctacacattcagggacgaatttgtcagctatttacacaaaatataatttaatctttatattcttccttttctaatattgtaaatataaaattatgataaacacataaaaattaggaaaacatgttgaagttaaaacaaaaataataataagtataatattgattaataagcataatttatatgttactctaaaatttctattgtaacaacattagataaggacaaaattaaattgagtctcatttttttgtaaggattaatttaatgattgtgcattttaatttgtttgaacctcatattttgagcaaagtattatctcatatttttactttaaattttttaatgtgatagtaccttacccaaaatatgagatccaaacaaaaatgcacaaccattaggttaattcttacaaaaaaaaatgagacctaacttgattttgtcattactcaatgttttcataatagaaatttgagagcaaccaacaaattatgcttattaattaatattatgcttattattatgtttgttttaacttatgcttgttttcctaatttttaaatgtttattataatgttatatttgtaatgattaaaaaatagagaatataaagattaaattatattttggattgagagctgacaaattggtccctgaatgtatagagcgctgacaaattcatcccttgatattaacggtaacgaatggaagttaacggagggatagatttgtcacactttttccactttcagggacaaaaatttgatttttatctttcggggacagatttatcagcgccttacacatttagggacgaaaatgactatttacctattaactattacatattaagaagttataatcaatatagaatgacaacataatttgctccttgaagtttgtttgttgcacaaaatttgctccaatcctttttcagatgaccttcttcctttcttctgcctctcctgattcctcaattaaattttcttgttcatcctgaatctccaaccttttcaaagaatttccatgaataaattttaatttgtcaccactttgctgggagattctgttttaaatatccagaagtcagaagagcttattgaacctatgatttgaacataaattgaaagacaaaaatataaatataaattgatatttataaataatttagcagaaccatgttattgtttcttgtctggatgacgaataaagaaatttggaatgacataataggaagtttgtcgttagcctcagcttgttggacaccaataataggttgagcagcaggttcatcaacatggttgacttcatggagggcatgaacaacttcttccagtagtagaggttgatgcaaattaggaacaactttagaaggtagttcatcttcaatgactattgtaacaccttaaattcttttaaattcttttctcgaaatttagcttcaaaaaatatttaaataataaatgttgcaaaatgtgtatcataacttttaatttctatttctaagttggacaaatatctcatcaatttttttctatttataaataagaaaaataaaataaagtaaaagaagtgtgttgcttggaaagcggtaaattttcaagtcgcaattaaatccataaataaataaatgcagatttataatacaaagcctttgtacataaataaagcaaataaatagtgtcacagtagaagaaatttatacaaaccaaagtgtaaaagtagtgaaacgatcgatttacaactactacataaaaaagaatacatctacaatgaggatcctgcccctcaaaatacatcaaaatataaaaaagaatcctaggattagagcaaatcaccacccaactaaaattattgaactacgcctatggtattgattgacacaagaaagtagtcaatcctcctcctcaaatgaagactctaagtcttgtagaagatcacgatactcttactcctcctcgagtgtcatatcggtgtgatctccccaatctgtcgcatgcaaaattatttctattatatacatgtctgcatatttttatccctacgcattgtggtttgggtgcaggagtgttcaaccctcagcgaattgtttgttatgtttgcctagatggcgataagtgcaaccgttatggtgtccaattgtctgtgtgtgaaaagtggttcaacagcttaaagggtcacaattagttctctgagagtagtatgtaggcccgagcctcatctttctttcttgtttgcttgtttgtacgccttggttgatgtacgtggtacaagaactgcacacgcgatgcagtggcaagattcaagaggactagacagagagtaaggaatcaatggttctatttccctccatgagaaagtgaggttactttgaggaagtggttgatggatagagatacactggggtgtagggaaattagcaagtggtgactaatcggcatttggtgcactcatttggcatgggtaactcataggccttacttttctacttttgtcttgggttccgacactctactttttgagtttggagatgaggggtcaatgtacaatgtatccgtatgtagcgaccactcacaactgtcatctacacaattttttaagaccatcaagacccgagagaattggtgacagtgattgggccctattgtgaattaagtgtgatagttacatgcttaggatgcgagagtgttgttttaaattttgttttgctattcttattgtttgtggcgtttgaggaacggaggaatcacccttgcaatcaccaatttcagtggaagatcatggagcattcacagaggatgctcatatgaattagtagctacaacaacagctacacaatggaggaagaggcacacctccacgtgcatttgggatacatccgacgccatgttttgctattagacaagtcccatatgccactgatcaccatagaggcgattcataccactacctgttcaagtgtacctctcaatgtgatactacccatatcatttcctactacgcttattttggatttgtgcggccagacaacccactgcgattcttggaacaatttttcgagcatgatgccaatggaaggcctactagatctacctttcatcggaatacgaccattgaaattcatgaggatgtgggagattttagtgatgatgacgatcttatgccattcgagatcgctttctgtaacaccccgtgtgcacccggcgtattatcattcgtaatatcagaatcgcgcttaaaacatatttctaaaactttggtgaaacggtaaaatcgtttttcttgatttcattacgtatggaatgcaaacacatcacaaacacatatataaagataattcacacccctgctgatccagtttataatacatcatcataggtcgataaccaattagcacaaaatactcaggaggaaaatctcatcatataatcaattgttttgtatatatatacatcaatgtcctcaccacacccgtggttatacaaaagaataactgccctcacacgagggtatacaaaactatacaggtcacgtgtgtacacatacacaccttcccttcacagggtacaaaacagtatcaaaataatctgagccttctagctctccctgctgccactcgtccaagcagatactgtctctacaagggcctcctgccttgagactgctctcctctgccagaagagtcacctgtaaacatataaaccccacacggggtgagatacacatctcagtaagcttagggtccttggagggatcttatccatcctggcccactcttcatgatacaaacatcaggcaatcacaaacaattggccccctggcccggcctcccggccctcataacaatatgagcaatcatcctgctctatgtacggcggatctcatcaatgcctaaccttagtgtgagactggaactcacgcccgtgtcgtcccatcaggagctacctcttacacatggacgcacgtatatggtacctccgagaataggcaatcaaccacaacgggacacacctatctcttggtcttaggggatcatcatcaccccgggatcatcatcacccatgagcaaaccaactaggaggaatggccgtctcctagggaggtccatatccatcttactggccagaagatctaatcacatgcataatacatttctcaagcatagatgcacacacatatcattatgaggatgcaacaaccaaatgcatgcataatgaatatgactatcactccacccggagtgtggtgtggcacaaacaagcgaaaaatcatcctcagggaccaagaacttacctggcaaagcctcgctctgcagttctttccctgctctgtggcaaccgccactgacaccctcggtgtcaagccctaacaaggcaaatgtgctcatatcaaaatcaattcaacaggcatccaatcacaacataatcagaaatcctctaccttagggtttatcatagcccaacacacactaggcttctcacagaccctcagaggtccatcatggctgaactcaaagcaattgagtcaccctagactcaatgctaaacacatacataagttcaagctctcattagcccataatcccaatatagcttgaacggtctatacctcactcaaggcaccgttcatctagcctctcaggctcagaacaaccataatcaaggctcttgcatgtcctaaaaccaacaagtgactcatcacccaagccacacatgcataacacagagccaagattaaagttcaccaaatcaaaatctgaaagctaatcctttatcactaaaccattccaaacaagtttctctacaggatccttggctaattctagccccagctcaagtgggtcactattcataaaaaaccccaaatcccaaattaaccgaggaaactctagtttcttaccacagtggcgaccaaaaaggctgatggatagtgtctcttggctcaggtgtccgtgctaagccttgggtccttgccaaactcaagtttcagaagcttcccttgagaaatagattctcacttaaaggggtttttcaagagaaaggatgaagggttaaagctctcaagatgtttctcacaagtttaatggtcattgggaggtgtttaggtaaaaaaactacggtcctaggaagcttgggttcaccaacaatggaggttctgatcgacatgccgcgcccttggcgccactttggcgctgatggcgctaaaatccaatgcatctggcgcccttggcgccactttggctctcctggcgccaatttccagcatctgcggcgctcctggcaccactctggtgctcctgacgccaacttccagcactgtggccctcctggcgccagactccatccgttgctaattctgtcgctgattctgtcactgattccgtcactaagccctttacgacataattttataaaaattaaatttttcgttctttctttcttttatccattaagcctaggttactatattcacaccacctttttaagaattttttccgcaaaattcaaaaccatacctatcaagcaacttggggtacagctgcaacagctcctgctcccgctcccaagttgtctcctcaggggttctgccttcccattgcaccttgactatgggaatagtcttgttccggatctgcttctccattctgtcaataatcctcaagggtcgtggaggactggtcagattctctctaatctgaactgtgtcgggctctaccacgtgtgagggatctgccacatacttcctcaactgggacacgtggaaaacatcatgtagccttgacaactggggaggcaaagctagcctataagccactggtcctatcttctgaaggatctgatatgggccaatgaacctaggactcagcttcttcacacccaaggctcgtcctacacccgtaactggagatagcctcagaaacacatgatcaccctcctcaaactgcaaaggtctgtgcttatgatcataatagctcctctgtcaactctgagcctttaacaacttgtctatgattattctgatctgctcaaaagtctcttgaaccatctcaggtccaaggaactgtttctctcctacctctgtccaacaaacaggagttctgcaccgtcggccatacaaagcctcatatggtgtcatacccaagctggcatgaaaactgttgttgtatgagaactccactagaggtagatatctgtcccagccagtaccttgctccaaggcacaagctctcagcatatcctccagagtctggatggtcctctcagtctgaccatctgtctgaggatggtaggctgtgctgagtctgagctgggtcccaaaaccatcctaaagagcaccccagaacctcgagatgaacttcggatctctgtcactgatgatactgtcaaggacaccatgcagtctcacaatctccctgacatacagctgggccaacttctctgcagtgtagtcagacctcacaggtaagaaatgagcagacttagtcagcctatccacaatcacccagatggaatcacatccactctaagtcctcgataatccaaccacgaaatccatgaaaatactgtcccatttccactcagggatctgtaaaggctgaagcagaccagatggtctctgatgctcaatcttcaccttctgacacaccagacactttgtcacatgttcaactatgtctctcttcattcttggacaccataaattcttctttagatcatcatacatcttagtggctcctggatgaatgctgaattggcccttatgttcctcagacaggacaacatctctcaacttgcccttaggcaccacaatacgaccttggtacatcaccaagtcgtgatcctcccaggagacatcctgctggccaatcatggctctcacagcctcatcctgctgctgggcttcacggattctcctgatcaactcattatccaccttggtcctgctcaactcaagaccatgtgcaccttctgtcactgtcaggtgcatatctctaaattgctcaatcaacttacaatcagagatcatcatgcaggcggcacacatatgcttcctgctcaaagcatcagcaaccacatttgccttgcctggatggtatctcaactcgaaatcataatcctttaggaactccatccaacgcctctgtttcatattcaactctttctgatcaaagaggtatctgagactcttgtggtcactgaacactatcaacttggaaccatatagataatgcctccaaatcttcagagcaaacaccacagctgccagctccaggtcatgagtaggataagactcttcgtgaggcttcagttgcctggaagcataggcaaccaccttcttatcctgcatcaaaacacatccaagccctcgcttggacgcgtcacagaacacttcaaaagttccttcagggtcaggaagagtcaatactggagctgtggttaaccactccttcagctcctggaagcactactcgcactcatgggtccaaacaaatggaactcccttccgcgtgagtcgagtcagaggtatcaacaactgagaaaacccctgaataaacctcttgtaatagcctgccaatcccaggaaactacggatctcggatacgtccttgggcctctcccaggacatcactgcctctatcttgttgggatccacacaccaattgctaaaatcacatggccaagaaacttcacctctgatagccaaaactcacacttggccagcttggcatacaacttcttgtctctcaaaatctgaaggactgtcctaagatgctcggcatgctccacctctgtcttggagtagatcagtatgtcatcgatgaacaccaccacaaactgatccaagaaaggtctgactactctattcatatagtccatgaacactgttggggcattcgtcagaccaaaaggaatgacctgatacttgaagtgaccatacttagaccagaaggctgtcttaggtatatctgtaggcttgatctgaatctgatgatacccggatctcatgtctatcttggagaacactctggctcccttcagctgatctaacagatcatcaatacgaggcagaggatacttattcttcatagtaaccttattcaactgcctgtagtctacacataatctcatgctgccatccttcttctttacaaagatcaccgatgctccccaaggcgagacactcggtctgataaactgtttggacagcaggtcctccaactgcaccttcagctccctcaactccagaggagccatacggtaaggtgccacgaatattggtcccacaccaggaaccagatcaatggagaactcaatctctttttctggtggtagctgagtaatctcttcatgaaacacatccacaaactcgctcaccaccgagatctgtaacagatcaacacctggcttatcttctgccacaccagcgaagatataaccctgagctccctccatgattgccttgcaagcttgcaagactgatagaaatgaggtggaactcgaaccggtcacgtcagaagacacaactaccctcttctgacaacagtctagcatcgcgctgtacttggccaaccaatccatacccagaatcatctcaagggtaggcatagctagacagtacaggtcaattacattctctctgccttcatacagaaacttcacgtccttgcagcacatgctcacctgacatctctctctaaatgcaatgataacctccatcggaggggcaaaactgaacttaagcaatttaaatctatcaacaaccacatcctgtatgaaggaatgtgtagctccagaatcaaacaacactctaacatcacaatcattgatcaaaactgtacctctgatcagatccggagctctggctacctctctggcgtccaccgtgtacactcgccctgctgtaggtgcgatcatctccaccggagtagcctgtgcccgactctttgtctgtgggcactctcgagatatgtggcatggcttgccacatcgaaaatagataatctggcctgaagaacatgatcctaagtgctcctttccacaagctggacacttagggactgatctcctctgagctgagtccctcttgaatctatcagaaggagcaggggctctcaacaccttgcccttacccgtatcgggtgggccagaaccactaggctgtttcccctcctgtctgactgagggaataggctgtctgcctctgtgtctccgcaatatgtcttccacttggcaacattgcctcaccaaggtatccatatcacgggatccactgcctgctaccagcacctctatatcctctctgagtcccctctggaacttagctgctaggatatcagcttcaggcaaagatcttcctaaatgagcatacttggccagctcattaaacttggccagatactcgtccactgtcatgctcccctggatgaggctatcaaactccgcctgcttctgctcccggacatctctaggaaaatacctgtctaggaagcagacctcaaatgtctgccaggtgacaatctctccctggcctctcaaaagctgagttgtggtcgtccaccactcatgggcgtcgccctgtagcatataggttgcatacaacaacctctgatgatcggggcactccattactgtaaatatcttttctaagaattgcaaccaccttgctgcagtaactggattatagtctccggtgaaaactagagggttatgcttacgaaaagtaataagcatcttccctttggctgctgtgtcgctcttagcctcagcttgagacatctggtcccctcgcaagtggctcccaccatcctgctggcggctacccacgccatcatgtgtaggaggtgtggaggatactctgtcatccctcctcagaatcacctcttctagcaaatcatggttagccttcatcaaggcttcattcacctctctggttgcagccatctcccactgcatgtccccctaagtctgtctagctgcagctatctctagctacatcatctcctgagtctgcctatttgcagccatctcttgctgcatagcggctaatgcagccgcaactggatcagactgggcattggtagccctactggtgcttctggatctcaccatggcactacacatgtacatcagacagtgagttgatcaggcccacagttaatgtatccacatgcaatgctcatgtcaaacaacaaccaacaaaagcaccaatcaaattccatacataatgtttccatcaagaaaaccgctctgataccatgtacatattgatgttactctgcctaaagctttgttacctgtcttgctatgttgattttgataaactggatcagtaggggcgtaattttatggttctgttgtgtgattccatacataatgtatcaagaaaacgatcatatgtttccgctgaactgataaattaatatttatacgctaatctgatattattaatgataacacgtcggaggcctacggggtgttacatttaatggtatcagagcggtttcttgataagaacattatgtatggaacttgttttggtgcctgtttgtgactgtttgacatgagcattacatggaggtacattaactgtgggcctgatcaactcactgtgtgatgtacatgtgtagtgctatggtgagacctagaggcaccagtggggctaccaatgcccagcctgatccagttgcggctgcactagccgctatgcagcaggaattagctgcaaaccgacagatgcaggcagagatgcagcaagagatggctgctaacagagagactcagggggagatgcagcgtgagatggctgccacccgaggggtgaatgaggccttgatgaaggctaatcaggatttgttagaggaggtgagaaacctcaagaggactgacagagcatcctccacacctcctgtagctgagggcgaggctagtcgccaacaggctggtgatagtcatcagctaggggaccagatgacccagttagaggtcgatagtgatgtagcagctagagggaagatgctgcttaccttcaggaagcataaccctccagtattctccgggggctatgatccagtagctgcagcaggatggctgcaggccctagagaagatttttgaggtcatggagtgtccagaccatcagaggttgctgtatgcaacctacatgcttcagggggacgcccataagtggtggaagaccactgttccattgttgagaggccgaggtgaggtgatcacctggcagttgttcgaggcctgcttcctcaacagatactttcccagagatgcacgggagcagaagcaggcggagtttgatacactcgtccaggggaccatgacggtggacgagtatctggcccagtttaatgagctggcccagtatgctcacttcaggagacccatgcctgatgctgagactttagcagctaagttcctgaggggacttagagatgacattcaggtgttggtggccggtctggggtcacgagacatggataccctggtgagacagagtcgccaggtggagggtatcctgcagaggcagcagagaggcggacaacctatttcttccggcagaccggaggggaggagagatagtggtactggcccgcccaggaggggtatgggtaggatgatgagagcctctgcatcctctgacagattcaagaggagatcagggcagagcagtgccactcagaggagaccacctccgaagtgtccatcttgcggacgagttcactggggcgcatgttcttcaggtcaggtagtgtgtttcagatgtggcaagccaggccacatagccagagagtgccctcagacagagagtcgggcacaagcagctccagtggaggtgatggcacccacagcaggacgggtgtatactgtagatgccagagaggcggccagagctccagatttgatcagaggtacagttctgatcgatgactgtgacgtatgtgtgttgtttgattctggagccacacattcctttattcaggatgtggctgtgaataggttgagattgcctatgaccagttttgcccctccgatggaggttatcaccgcatccagaggaagatgtttggtgagcacgtgctgcaaggacgtgcagtttttgtatgagggcagagcttatgtgatggatctgttttgtctagctatgcctacccttgagatgattttgggtatggactggatgaccaagtatggtgtgatgctagactgttgccagaagagagttgttgtgccttctgacagaaccagttcgagttttgcctcattcttatcagtcttgcaagctcgtagggcaatcatggagggagctcagggctacatcttcttgggtgtgacagaagataagccgagtgttgatctgtctcagatcccggtggtgagcgagttcagggatgtgttccctgaggagatcacccagctaccaccagagagggagatagagttctccatagatctggtcccaggtgtgggaccaatttctgtggcaccttatcgcatggctcctctggagttgagggagctgaaggtgcagttggaggacctgctgtccaagcagtttatcagaccgagtgtttcgccttggggagcaccggtgatcttcgtgaagaagaaggacggcagtatgagactgtgtgtggattacaggcagctaaacaaggttactgtgaagaacaagtatcctctgcctcgtatagatgatctgctaaatcagttgaggggagccagagtgttctccaagattgacctgaggtccggatatcatcagattcggatcaagcctgcagacatacctaagacagccttccgctctaggtatggtcattatgagtatcaggtcattccttttggtctgacgaatgccccagcagtgttcatggactatatgaacagggtattcagaccttttctagatcagtttgtggtggtgttcattgatgacattctgatctactccaagacggagtcagagcatgccgagcatctcaggacagtccttcagatcttgagggacaagcagctgtatgctaagttggccaagtgtgagttctggttgacagaggtgaagttccttggccatgtgatctcagcagctggtgtatctgtagatcccagcaagatagaggcagtgatgtcttgggagaggcccaaggacgtgtctgagatccggagtttcctgggattggctggctactataggagattcatccaggggttttctcagttggtggtacccctgactcgactcacacggaagggggttccatttgtctggacccatgagtgcgagcagtgttttcttgagttgaaaaagagattgaccacagctccggtgttgactcttcctgatcctgaaggcgtctttgaggttttctgtgatgcatccaagcggggacttggatgtgtgttgatgcaggatcagaaggtggttgcctatgcttccaggcagttgaagccacatgaagagtcttatcctactcatgacaaactaatgaaggctcagagtcgtcagaggagttattatgatcagaagcacagacccttgcagtttgaggagggtgatcacgtgtttttgaggctatctccagtgacgggcgtaggacgagctttaggcatgaggaagctgagtcctaggttcattggtccatatcagatccttgagaggataggaccagtggcatataggctagctttgcctcctcaattatcaggacttcatgatgttttccacgtgtctcagctgaggaagtatgtagctgatccctcacacgtggtagagcctgacacagtccaggtcagagagaatctgacgagtcctacaagacccatgaggattttggacagaatggagaagcagatccgcagcaagaccattcccatcgttaaggtacagtgggaaggcaagacacctgaagaagcaacttgggagcgggagcaggagctgcttcagacgtatcctgagttagctaacaggtatgattttgaattttgcggacaaaattccttaaaaggagggatgaatgtaaggacttttattttcggcgcgcggggattcaagtcagaaaaccctgctaagggtgcggcgccgatggcgccaaatgtaagcatatgtttaagcttagtttaagcatgaatctaagtttttgggttaaggaatatgatcatgctttagaatcctctgaaagatgcttaaaaatgcaagtttatggttgttctggcatatggcgcgacccacttggggtgcggcgcgacctgcgccatatgtgtaatatagggcagatggctctgccatgccacgcaattaacttgaagatccacgcgagtcgcgtggcaagtggtctggaaatcatggtttcctctggggctccacgcgagtcacttgggatccacgcgggtcgcgtggaaggcccgaatgaatggcgcgagtcgcgtggtaaaacgacgcgagtcgcgtgggaagtggcttagaaatggtatttctgtctgccatcccaagtgagtcgcgtgggagttcaagtgagtcgcgtgggaacgtcggcagatcagaatttaaaggccaaaacgttagaaatggaaggaaaaaaaccatttcttcttcctccctttagccaacctccattgttgaagtcctaaagcttcttaggacttgatttctcagcctaaacacttccctgagccttagaatcttgattgaaccgattagaaagcttaaatccttcatcaaattccttgaaaaccccaatttgagtgagaagaggaacctcagagggaaaagctcagagaactcgagcttggcgcagaaccacagcataattggaacatagaagctaggagaagctgttctgaggctgttggagtcgccactgaggtaagaaacgcaagtttcaccgtttaattttgattatgggggtccctgtgaatagtgacccatatgagctggggctagaattagcccagggtccagttgagaaagttgttcagggcttagagtagatgaaggattagctttcagtttttgattctgataactttgaatcttggctctgtatatgcctgtgtgacttatgtagagtcacttgttgatggttctctgataggctagagccttgattgtgatgctctgagctgagaggctagtagagcagggctttgagtggacctcagcccttttctgataacaattgaattgtgaggctgagtaaggcttagttatgtatatgtgcggcgagtctagaatgactcagatggattgtattccatcctgatggaccttgagtggtcttagagcagcctagtgtaggctgagttggtttgaaccctaggataggggaattatatatatgtttgatctgtgattgatgtctgtggtcttgagattgatatgatattacatgtgccttgattaggccgtgattctgaggttactggtggcgggagccacagagcagggaccagaccacagagtgatattattccaggtaagttcagtgtccctggggatgattcccatcttgtgtgccacaccacactccaggggagttgtggtcatgtcataatacatgcattgcatttgcattctgatgatgatgacatatatacctctgtgcttggtatatgctggttatatgctgaggtatgattgtattatggactgtgattgtgcttgagatagatctattggccaatagatagatatggacctccctaggagatggtttcctcctagtatggctggctcatgggtgatgatgatcccggggtgatgatgatcccctaggccaagggaatagttcagatggtttcctgctattctcggaggtaccatatgtgtacatccccgttaagggtagcgtccggtgggatgacacaggtgtgagttccggcctcacactgggagatggtttcctcccattccaggagatggtttcctcctgctttgtgatggatataggagatggtttcctcctatttggtgacttgattacaggagatggtttcctctgctctgagatgtttagtcaccttgtatgatatgctgtgtgattgagaaagccagagggctaggccagtgggccatttgattgtgatatgtgtgcatatgtattgtgatggtgagccaggatggaggagattcctccatggatcctgagcttactgagatatgttatctcaccccgtgtggggtttatgtggtttcaggtgaaccatcaggaagagaagagcagtctcagggcaagaggcccatcagagactagactgctaggctgaggagcagctcagagagcatgaaggctctgttttgatttgttttgttttagttctgtataccccttctgagggacgatattcttttgtagcaccgtgtgtggtgtgaacctgtgatgtatatatattgtacagtacctggatatatgtatatgagactttccctgagtacatgtgtatgtttatattgatgttactctgcctaaagctttgttatctgtcttgctatgttgattttgataaactggatcagcaggggcgtgattttatggttctgttgtgtgattccatacataatgtatcaagaaaacgatcctatgtttccgctgaactgataaattaatatttatacactaatctgatattattaatgataacacgtcggaggcctacggggtgttacaccgtgtgcacccggcgtattatcattcgtaatatcagaatcgcgcttaaaacatatttctaaaactttgcggaaatggtaaaatcatttttcttgatttcattacatatggaatacaaagacatcacaaacacatatataaagataattcacacccctgctgatccagtttataatacatcatcataggtagataaccaatttgttgattcaagtgaagctaagtatcaaggaatgaggatcaagcttcaagattttggactttcaaacatgcacaaaggaaatgatcaaaggaaagcttgaagaatcaatttgataaattgtaaaagggagtatatgatctgataatccaagtgtgcacatcatgcatcaatcattcatttaaaggtcattgaattaattgattaagtaaaagaaaggcacttaggaagtaaagtttttggaaaaattaagttgctaataaataatcgattacatgaataggagcatcgaatattttgttcttcgtgtcttttagaaaacaaaacatgatcattgtaatcgattacatatcaatttaatcgattactcaagctttttatgaaaagatggaactctctgtcttaatcgattacaatatatggctaatcgattacatgcatgtacatgcatcttagaaaaagacatgctgactgtcttaatcgattacttcatggaataatcgattatattgttcttagtcaaaacccagaaagcttcaagatcattttaatcgattacattatttcttaatcgattacatagtttatcttggaaaaccatgtgtctctgtcttaatcgattacgtatcgaaataatcgattaaatggttcgttcttgaaactcaggacgttttataaacattttaatcgattactatcttattttaatcgattacatatgctaaataatcgattactggagcgtgattaatcgattattttcagttaaaaagctgttataaataaaacttctcaggctgaggtttgtaacttttgagtattttgagaattatgaattgtaagccgtctcctagggaggtccatatccatcttactggccagaagatctaatcacatgcataatacatttctcaagtatagatgcacacgcatatcattatgaggatgcaacaaccaaatgcatgcatcatgaatatgaccatcactccacccggagtgtggtgtggcacaaacaagcggaaaatcatcctcagggaccaagaacttacctggcaaagcctcgctctgcagttctttccctgctctgtggcaaccgccactgacaccctcggcgtcaagccctaacaaggcatatgtactcatatcaaaatcaattcaacaggcatccaatcacaacataatcagaatcctctagcatagggattatcatagcccagcacacactaggcttctcacagatcctcagaggtccatcatggctgaactcaaagcaattgagtcacctgttagacttttggcaagcgtaccaattgtcgttgtaagttacaaaatttataaaagttcatctccacagagacttgatttttactcagttaattcaaataaagttttaacagtttaatagtttatatacagtgagtttgaacgaagttgcatgtgattgtggattactagaaattacgtaaattcaaaagaaacagaaataataaatctagtacgaaaaattacgaatgattactgaaaataaaacgagtttgattaatttaagagcataggattggatttcatcgttcatacccttagtattcaattaatattaccatgcataagttattttctattattattgatgcacacataaaatcaccccaaatcgatgtctcgcatttgagaatcctaagaatatttatcaaatatcgatttctcgcatatgaaataaatatcccagcgttacgattatattcgcgtgtttatttgcaatctaaacattatgatctatgtctagcatcgtaacgtaaagagtaaatttattcaattcaaaccctaagattacttctcagtctcacttcgagtttaagttcgtgatattagtgatcaaataatatcaagcgttaactacggaataaatttaccaataataaatagaaaaacttatgcaaaaaataaatatcaaaagaaatactagaagggtaagaagattacatccaatccataaaagaaactaaccaagcatggagagaacctccttaagagaagaattgatgaaaggccccatcaccgcttctttccggcagagtctccacactaaatctcacttctctcactttcctaatctacctaatactaatatttaagagcctaaactaaagaaaaggcttaagaaacaaaggaaagagaagaatggaggttgaaaggaatgccttttgccttgggggtgcttgggtatttataggggatggcctggtcgagtttggtcgcccaagcgaccaatttcttcatgaaatactcgcttgggcaagttaaatgcaacttgcagcccacttgcacgtccacttggccttcaagtggtccatttgctatttctgctcgcccaagctagcaaaatacactatattaactcgcttgggcaagttaaaggtactctggtgggcttttgggcgtgattttgctttctgcacctccagttttgctgttatgagtcatttttgggtctgatttgctttctgcacctcccaggtctgctatgtaagccctccttgcttactttgcttattcggaagccttgaaaatctacggaatctatcaaaataaaaataaaacttggatgaatcttcgagacatataattactacgtgtgtaacataaactaactagattagggcaatttttgatagatattcttaattaaaacacaagataaatgcttcaaatgtaatccgacttttactaagatatagcatttatcatcaccctagactcaatgctaaacacatacatgagttcaagctctcatcagcccataatcccaatatagcttgaacggtctatacctcactcaaggcactgttcatctaacctctcaggctcagaacaaccataatcaaggctcttgcatatcctaaaaccaacaagtgactcatcacccaagccacacatgcataacgcagagccaagattaaagttcaccaaatcaaaatctgaaagctaatcctttatcactaaaccattccaaacaagtttctctacagaacccttggctaattctagccccagctcaagtgggtcactattcatagaaaaccccaaatcctaaattaaccgaggaaactcgagtttcttacctaagtggcgaccaaaaaggctgatggacagtgtctcctggctcaggtgtccgtgctaagccttgggtccttgccaaactcaagtttcagaagcttcccttgacaaatagattctcactcaaaggggtttttcaagagaaaggatgaagggttaaagctctcaagatgtttctcacaagtttaatggtcattgggaggtgtttaggtaaaaaaactacggtcctaggaagcttgggttcaccaacaatggaggtctgggcgcaggaggaagaagaagtgaaaatgcccaaaaaaattcgtaaaatggcccttatatatgtggaaaataaggaacacttcatacttaaccaagaggaggggtgaattggttagtcttagtaaaataaaattttctcaatgaaaaacagagtttccaaaaaacaaataaaagtttattgccctttgggatctttatcacaaaaacacttgaacaatctttatccaatgatcaacccaagacttgaaacaccaccaagataaattcacacaacagaattaatttcaagaataactaagaatgttaaagataaaccaatacaaatgatttatactggttcacctcaaaacctatgaggctacatccagtttcttctactcaacactagagtagaattccactattgcaaaatatccttacaagcaattatactagtctctctttatcaaccctagataaagttcagaagtctaaaaccctattagactcttagagaccaaaccccttgccaagaacactactcagcaaaaactagagaaacactatctctacacttacaagacacccattttacaatagacaaaaccttaaaagaattcaaacaacagtttacaccaacaaaggacaaggaaagatatcacatgataatccaagaatgaatgcagagtgaatgaaactcaggttgattgactgatcacacaaacatattcaaacctttccttatgccttgaatgaatgatgagacttcactttcttgattcaacaacccatatggatttggtgaagtcaatgtgtttagaacagagaaaaactcactaatgaaagctcagaacgtgtatgaatgccttagcattcgtaaaactcaataattgtgaaagctgtgaacctcagtctgagaggtcccttttataacagaattttaactgataataatcgattaaacacgctcctgtaatcgattatttaccatttgtaatcgattaattcaagatgtaatcgattaaaatgttcttgaggctttctggattttggctatgaactaaataatcgattattccgatacgtcatcgattaagccagagtgacctatttctctaaaatgtactatgtaatcgattaccaattgttgtaatcgattactccagtaggtcaggctttttcaaggcaggcttgtaatcgattaagaccaaatgatgcatttttcatattttagcctaagtaatcgattaatccgatctgtaatcgattaccttgttcttgatttgtttttcaaaggcacgaagaacaaaataatcgattccaatcagtatgtaatcgattacttcactaaaacttggtttttcctaaaatttttaaccttttatgtactgcctttgatcaattcatgtaatctaatgatcctagatgaatgaataatgaatgacatgaaatgcacacttggattatcagatcataactcccttttacatttaatcaaattaattcttcaaagcttcccatggttctttagcctttggtcatgttgaaagctcaaaactccttgaagcttgaatcttgttcatgatgcttggcttcaattgaaatcaacaatatacaggttctgactgacatgccgcgcccttggcgccactttggcgctcctgccgccaatttccagcatctgtggcgctcctagtgtcactctggcgccaatttccagcacctgtggcgctcctagcaccagactccatccgtcgctaattctgtcgctgattccgtcactaaggcctttgcgacataattttataaaaattaaattttcgttctttctttcttttatccattaagcctaggttattatactttctacctggatgtcatcggtgaagagatatctgagggagagatggttttgtccgacgaggaataggattccttgggagacaagaacgaacctttcgaggatatgacttcgccttaggtagcttgtgggtcttggttagtgactgttcttagtgtaggattgttttctctttttaatgtatatttagagtgggaagatttatatactcagtgtcataatattttgttgtattagaccttttagtgatactgtgtgatgttttgagggacgttggttatcttattgttaatagttgtaatgattttgttacacacatgtttaaatcttaagggtcactaagactgaatatctatgtttacttatttcttcaagtttgtcattatttaatgttgtgcaaagttatctctttataatttgtactttattatagcgttatgtaaggatggaagaaaaaaaaggcaacaacttttaaaatgtctttttgagcacacatttggacaataccctttttcaagagtgttttaattatacatatatgttttaatcaagctcaatatatacatattttattttgttgtttaccgttgtaatgattctggtacacgtatgtttaaatcttaagggttacttagactcaatatctatgtttactttcttcaagtttgtcattatttaattttttgaaaatttatctctttaattataatttgtactttattatagcgttgtgtaaggacataagaaaaaaaaaggcaacaacttttaaaatgtctttttgagaacacatttggacaataccctttttcaagagtgttttaattatacgtatattttttaatcaggcgcaatatatacaggcatacatacatacatacatacatacatacatacatacatacatacatacatacatacatgcatacatacatacatacatacatacatacatacatacatacatacatacatacatacatacatacatacatacatacatacatacatacaacacataatattgacatctgaaccttttttcactaatttgatcatatattgagttataggcattatttttgaatgaaactaaagtcattagttagctaacatatagggctacaactttcatgcaaactgtttttcctatttctatcattaagttcaccagcaaatttccccttgcctggaaaaaattgcatttgcccagggaaatctgcaagtagttcacgttgtttttatatcaatttggcccaacaaatttttgtattttccaacaaaagttgtgtcacagagagttgtgattctgcattatatgttcccaagggttcctaaaacttcaaaacacactctaagtatataggaataaaaaaagcaaaaatgaaacgataccaattatatcagaattcataaattagtcataggaaacatcatttaaatgcatccaacacaatttcacacaattcaactcaaaggacaaaaaatggataaaaaaaccaagaacaacaaaacaactaaactatcaatccattaccaaattaaaatgctttgtgtgttcacaacttgtccaatccaaggaaaaaaagggatgcactttacctcaaagtcagagaagagaaacacaaaccatagacactccttcaatcttgattcatgtctttgatggggctctatgcaatgatctttctgtttccactacattggcaccaaaccgagaagaaataagaaaaaaggaaagaagaaagaggtttagggtttaaacttggggagaaaagaaaaatagttttcttttgggtatatgttaaagacttaactaaaggttatgaaaaaagctcatgggccacaatccaacaattaatgtccaactcttggctcataaaactcttcatttcttgttcactacataatacctatttttaactccaatcataattccaaaatatcacttatttaattaattaccgaaaacatttacaaatgcttatattatttaaatcaagctaaaatataatagcaattttacataaatgatttttgatgtattacactcaataaggatttgatcgcggccgtacgcaaccaaattaatttgatttttaatgtagtactaggaaagtgactcctaggtcgtctctcaaggatcaattgtcaatgtttaagggattgaaaacgtgttggggggtttttgaaggaatttggcagaatatataaaataaaatagaattactaattaaacgcagtgattaaaaacagttagaccttagaacatattacgcctttaatatcctcggttcacacaagagaattgattctgacttaatccttatcagttcagattaatcgactaagcgaagattaacctaaaacgtcattacacgaattaagcaaacgtgaacctcgttagggcaaactctcagaattaagcaaactgagaatactgaatcaatcaatatcaaaattattaagcatgactctaattcgaaaaatacagaacagaaacccaaacaaggaagaacaagcagaaaacgaattagaagaacaagaacctccattaaaggtctgcaatctgtcctagggtccaaccctaggtttagccttccattaattcgaaattaacaatagaaacgtaaattgaattgaaatgaaacattaaatgaaattaagaacagaaacgaaattgaaattgagaagatgaagcagaaagcgaaaacaatactgaaactgaacgcaaacgtattcagaaaaataggaaacgtaaactctaaaaacaaagaagcagaaaacaaaaatattaaaactaaaggaaaactgaactaaaattgtattgtaggctgtgtcttgtgttgtctgttgtgtgtttgcatgggcacagaacccctaaatatatagtaactgtctaacctaaaagaatggacctttttctaacaaatttggcccaaaatcactaaagataaaataaaataaaaacgaaatccataatctgatatggaaaatattaagcataaataaaaacgaaatctataatttgatatgggaaatattaagctgatgctgacgtggcgtactaatcttcaagtccataaattaattccaagcccaattaattattaaactgccctgaaaataaaaattgaaataaataacttaaaataatccaaattaattaaaatctgaattatcggtccaattaaatcctaaatgagaaacaatgcataaataaatgattaaacacaaattagggattaaaatgagtacagaaagatgagtaaatagtgataaatagtgactcatcaggatttcaacattgtcactaaaatatggaacctgttttcattttcttattgtaacactaaataaaattatacaaaaataattgatgagataaaatggtagttaattcctattgttgtttgtggatgaaaatcacttttcccctccaattagagaactccacatcaaataaaaatgacacctcaattatatcttacatctggagaacattaacattgtttatgtttatctttgcttcacttcgatccaatcaattcaacacatctccaatttcagaatctagacaattctcaaaactcattttcttttcacttgttgtgtacttgagctacataatgtgaattcttgaacaaatggttggattaaataatctagaagaaagttatatttaaggttaaacacaactttggcccccctatttagcttaactcataaattttgtccaatcttcaattttgtctacacttatttcatttattaattttttacattagttaaatcatttcttgatgattacttatatggatatgttaggtttaggattcaattagaccaaaataaaataaataaaacatatggaaaattgaatatttgacctaaaaaccgattttcgaaaatagaggaccaaatgtctctattttgaaataaagagaccaaagttgaagattggacaaaataggggaaccaaattaaagttgtgtttaagccttatctttaatagtccgctttgacttcttcacgaacctcataaccttatttgtctttgagtcctcaacctttgatcatagcattttaaccgtgttgaggaacttgcttacaaatggatacgtcattattgttggttccctaattaccataattatggttaaacactttgatgttatccttcctcatgcttgcaacataaaacttgcacacatacattcaaacaccacaacacaaagagactaaaccaaatgagagaaagcaataagttacctagagaccatgacatatgaggcaagttcgatgtcatgaattttgagactagagaaggagaggaagctgattaagacctaaatgtcaaggggttgaaagacaaagatatgcaaagctaacaaacgaaagaaagaaagggaggagccttttggtttccatgactacaagaaagaagtaagggtaaaagctttaaagagcaaaggttgaggttttggactcttgcgacaacaatgagagttggaagagaaatgatttttttgcttatctaattgttttctaacctccggtctaaaaaaatgttgactttgatagtgacatttattattgtcatttaattaacaatatatatttattattatggaatgcgatttgtattttaaaattataggaataaataaaaatacaccaaaataattgatgatataatggtatatgaattgaatcctactatagattgtggacgaaaatcagttgtctcctccaattagagagtgctacgtaatgccacctcaatgctacattacatttggagaaaattaatgctttttatgtcttgtcaccgcttcacttggatccaaccaatccaacatttctttcatttcaaaatatgaccaattcatagaagctttaccattttccttaattcgtgctcactactaaatggatcacaaccctttcttcctatactaaccttggttttttcttcttcctttttttcaaaatcaattattttaaagcatttaattataggcattaatagtaggggaatgagatctaaaagggtgagggtagggtgatggactattacaacaacaattagagttggaagggaaataatttttttccctatctatttattttctaacctagtcccttggttcgaaaaaaatgttgactttgatagtgacatttgtttatgtcatttaattagtaatatatattaatttataaggatgacaaagtgggtcaatccacccaaaatggactgggatggcccagcccaccaaaaaatgggctgggctgggctggctcacatttgcaaagtgggttggaaatgctagcccatcccactttaaggtgggccagtaggccaattcacctaaaaaatataaaaaaataattttaaaaatgaagccaaaaaattataaaaactacaaatgtaattaatttatgatagatttatacattaaattaaagttatcaaagcaaatagcaacatccatacattaaatttaaaatttgctaaaaacaagtcagaaaacattacaacttccaaaaaataacgcatagtctatgagaaagagattattaataaagattaaagaggaagaaaaaccaccaaagttataaaacacaacaccatgatttaagaaaatgtcacaattcttaagatgaaaaactattcatatagaactacaggccattaactagcaaactgcagaaatcattcaccataatctccgcaacattcagttgaaggttgatgtcatcagccattattcttgggtttatacagtgtagtattatggcttgaatcttgcttcagaaacaaaaaaatattccaggcaaatcaagcatggaaacttattttgccatgtcatttgaatgcagcaatttcaacaaacacttgaaaaataaatgttataatgctataatacgagcataatgagcaaaggaataacttcaagttataatagacaatataaaaaaattaattacaataattaaaaatacctcaaactataatttaaatcaataataattaaattaaaatttatatataaatatgtctagctaatttttcgtgtactaagtcctcatcaccatcgtgattgcaacttatgtaatcagacctatatttaaaattatgtataactagaattaatggttttcttcatatgtgttatccctccttctggttccattagttttttatttagtcgtctattttttactgttgaaatacacaacaattggttttcctaagccatattctgcagcaaattctctagccctagcccaccaacaaacttacataaacaaaagggtaaagttcacaaattcaactggcgatttcttaagatgccttcaataacgagtatctcacaaaaattcgaacgttcataaagtatagtaacaagcaattaacatcaagatctagttctctatgttcaacaatcgattccaacacaatgcctgataggaaacgtgaacgaacgagatcgatgaacgtaatggctttctagtagttggagtcgtaggtgatagcatcggagcgaagctctggtgtagagctcgatgacgaaaaaatagagttcactgtaggcggaagctcggacggtgacggaagctcgaacgaaggtgcagagctcgattctcccgttctcgtctccggtctctcactctcttctctctcatactctcactctcaacactcaatattcattattcaataataatataatatcttttttttattagaggtagcaaccaggcgccagctaatagagtgcttttagttaagtatttttctatccttagcttatttgacccctcttggacctttattttcctattctaattcagtttttggcctaggcaagtaagtgggcttaattgctaattgttgcgtattttcggatttttgctcacttgatgtatctgacttgtgcaggacctatagggtgctaccgatctctgaatggagcgttctaggagtctctggaaagataacaaaaagatctacaagtttgctaaaaatagcccaaggctaattctgtcatttagagggtcatttttagcttttaagttagcacctctacacttataattttgggctgcgaatttgactttcatggttgtaaatagaaaataattagattgttgggtttgtttgtggcccattttattttgagaactcagtgactacatatattagtgactttagtaaaacttgggcaccactctttacatttcaataaacaagttttatttttcattcctttagtttttagaatcaaactcttgttcttcattttctctctactgttcttgtttgttcttcattgttcttcatttttgtttttctgttcttccattttcgtgcaaccatttcatggagctttcactgatgatgatcatggaaggctaatgtaatattccttagtcccagcgcgtttggcgcgaattaggacgcgtatggcacgattcgggaagcgtctggccaagaattctgcagaattcttctacagaattctggcgctccaggcgccgtggtctctggtggtcggcgctccgggcgccaggtcggcgccagtggcgccggaaccactttgatttcccagcaggcgcccttggcgccgtgggtggcgcggttggcgccagatgttctggaggttggcgcttgaggcgtgggagctggcgccggtggcgcgggactctctggagggtggcgccgttggcgccggaggtggcgctcttggcgccagaggtgctggaggctggcgctcttggcgccggggtcggcgctggacgcgccgtggactctggaaggtggcgctctgggcgtggggccggcgccgaaggcgccgcagctcgggcagaccccctatataaagctcatttcgcaatttctgaagccccaaaccccttttcttcttcctcagacctcctacctccattgttgagtgcccaaacttgattccttcaccatacttcaccaaaagcacttccttttgcttgttttgtgatggaaatcacatattgagcttgaatccatcctctctttcacctcaaacccactcattttgagaatccctttctcaagagaagttcgcggaacttgagctcggcgaggaacggcgacgattcgtgagtacccaagctaggggaagtcgtccgtgggtcttccttgcgtcatttgaggtaagaaacttaagaattgcctcttgattcatgagttggggttttgggtgaatagtgacccacttttgatagagcttgaattagctttgggtccagttgaaacatgtgtttggaatgttgagaggatgtaggattagctcttagaagtgaatttggtgaatgttgattccatggctcttgttggtgcatgtgttgttgttgggctgagttgcttagccattgttgtacatgctagagccttatgttgtggttgtgatggccttgtgaggctattagcttgatggcttgtgaatgccaagctttgatgaaccgtagggtagatgacttgtggtttggaaaggattgtgagtcctttcgtgcttgagcggttgtgaaccgttttgcttgtgcctcgtatggcttttgtgattgatacatgttgttgtatgtgccttggatagggcgtgacaccgagggtgtcggtggcgtgggccacagagcacggggagaactgcagagctcggctttgccaggtaagttctggacccttggggatgtttcccacttgtgtgtgctctaccatactccgtgggagtagtggtttcattcatgactcatgcattgtgatgatgttgcatgctcatatatatacatttgcttgtagctgtgcttgatattgtattaagcctgttattagatcctttggccaataggatatatatggacctccctaggagatagcgcaactcctagtttgactggctctggttgactcggtcccgggatgcggagattccctgaggtcaagagctaggtggtcccgttgcggttgcagcctagtctcggaggtaccatatacgtgcatccatgcgaaggggtagcacccgatgggatggcacgggtgtgaattccggtttcacactgaggtcggcgttggactccgtccgccgtacatagagcaccgggttggcgtgcattgtattgtatgagaggccgggatggcccagtgttgtgatgccatgatgttgtatcatgatgagtgagccagggtggaggagatgcctccaaggaccctgagcttactgagatgtttatctcaccccgtgtggggtttatatgtttttcaggtgatgcttctggcagaggggagcagtctcagggcgggaggccccagtagagacggtacctgcttggccttgggcagcagaggatagcttggagctcggctcagctattgaggtgttttgcacgcttggagctcggctcagcggtgttttgcatgcttggagcttggctcggcatctttctttgtttatgttgtgtacccctgtgagggaagacgtgcgttgcgcatgtgttttgtttatacgctgatgtatatgtatgccctcgtgtgaggaaggatccgtgggatcagaaagcgctcggacgcttattgttgtatatatatatatgcacctcgggtgccagtgatgtatatatatatccggttttcgttctgttatgcttactcctgtttatatctttgagatatttgcgtttctgcctatggtctgtttgtatgatctggttaagcaggggcttgttgatgcttgatgtgggttgtgtttccatacataatgttatcaagaaagatggtttggttttatgcttccgcaatataaacaggttttattaaaaggtttttaattatcttgtttaagcgctaatctgatgattatataatgttaatacaccgggtatacacgggggtgttacagctaaatcctcaatcaatccaagaatccaacccaagcacaaggagaatttgagttctggtttagtatttcgaatcctatgtgaatgttcatcttcttcttcaattgctattttgttttcatgattatgaatgcgtttaggattgaaaacggattaggttatggattcatttcctaatttcgaacattaatcacaaaattaattggatgatatttcagttagaattgtggtttcaatcaatttaggggttaagtcgattgagttgcttctaatgagattgaatgaactttcatgataggattaatttctgagaacaataatgattcgaattgtttggtgaggtgaattggattgatgttttaaattctattttacattacttcttttgaattctgttagtttctgtgttgctctttaattttagtttacgtttttgcaaattttacttacgcacacaaactgtttgataaaattctccccttactgttaccattgaattgaagctagaaccatattgatcgtgtctttgagtcgacctaggttatctttgtgccatagaattagcttagttaaattgttttggtgcatgtcgacaatgtcatatcaccagcgtgtattcactgtattgcaaatgttattggtgggctttggcctgtattttggggggtcggattggccccacccgtttttcaatgtggactcataatttctatcaaacccacattacttttgagttaaacgagctagcccgtcggggcagacccgttttaccacccttattaatttataaaatgtgtttttcattttaatatagtgtagcaataaataaaaatatacaaaaataattgatgaaataaatggtacattaattgaatcctattgcagtttgaggaaaaaaaatcacttgtcaactccaattagagagcatcacatcaattaaaaatgtcaccttaattttacgttacatttagagaaagttagtgtcatttgtgtcttgtcttgtctcgacttcacttcaatccaactaattcaatgcgtctttgatttcaaaaattaaacaacattttcagaagcttaaccatttctcgtagttgtgtccaccgcaaactagatcacaatcgatcctctcttcggtttttgcatttttttcaaaataaattaattttatttttttgtactatttttttattgtattgactttcattatctagtttgattgttgaattggtttctatatttacctattggtatcagtacgagctggacatgcatcgtttcaactatagtctactcattttctttttatctttagcaacagtacaaactcgtcaatgggaaacaacatgaatcacaaacactatcatcatggaaaacaataagacaatggcgaatatgtcaaaaaaagtattggattggtggattcaaaatgaaacaaagacgatatacaaatatgttaatcttttaatagcctgctataaaattgattagtggaatttttattaattgatgtgactcactctaataagaaggaacaaggatcgaggacatgattggaaacaagtggatttcatttatggtttgttctctggtttcttttcagatctttattagcttaattaattatacagtaatagtttgtataaactccattctggcttagtaaataaacaatcaagccaaatagaaaaattatatattttgaaggtagttcagagaaagagaaaaggaaaatgaaaaacgcattccaaagcattcaacacatcataaattaaggtacatggactgaacgatcactaaaagccaaggcactgcagttacaaattaagagagagaaataaagctaaaagactgaaaaatagaagaacaaaaaaaacaaaagttggcgaaaaatcctaacttcctaaacaaacacactttgagtttgatcagagtgatcttattaacgccaagtgccaagactgattcaaccatgatgacgaaacaaacaacttctaagcattcttcatacccaagtgatttggtgtttgagtttgaggtacagtgtgcatacggtgaaagttgcggtggcaaccgcaacaagcacataggagaccgtcctcaccgatgagatactcaagacaaccatcatgggagactcgaccaagtgctgctgcatagttgtacatacactccttgtaggtcaccacttcacctgttggtagtgactggttggtgttggtgttgatatcagacatggtgaaattaaggagtgaatggatggatgcttgtgcatttgcgttgagggagaaaggcttaaatagaatggtgatggaagaacatgagtgtacgtgtccacttggaatatggtcttgatgcatgttgtgacgagtttccatcaactgaatcctaaaacgtgtcttcttacatcatatctatttactatgttagaaaagtaattcctccagatgtctaacgtttcccattccaagtgtcagtatcttataaaacttaatttttttaaactttgcttatatctttgtcttaatttctttctttttagtttggtcccttttaaaatttttctttctttttctttttatatttgtttctttcttctattcttacagtttttttttttatgtttattctctctctaaaagaaaacttatatattttgaaggtagtttaaagagagagaaggaatataaaaaatgcattccaaaatatacaacacatataagaaattaaggtaaatggccggactgaatgaaaaatgcattccaaaatatacgtttcttgttacgattgttaagataatgacaatctctcaccatttatcataaatatatattttttatttatcattatagagataattatccttttaaataaatcttttgaatatcatttattttcgtaattaatattttccttatatcacccatttttatgagatgtaaataattacatttacaaaactttattagtcttctctttatattgtactagtataattttattataaatgattttagaataaaaagctatttattaatccttctcaatgtggtaagcttaattacgagcattataaaaaggaacgattatattgtttgaggtttaaaatacgctaacaaaaattctttgtttccttcactagttcttcgtatattctttttgttttccttcttgtctttattttttaggacattgattgtgattctcaaacgtgtttttgggctcgtgtttataagtctaaatatgtcaatatatataaaccttgagaaaaacaaacgaatatacagttgcacgttatatccttcaaaatttgcttttaatgtgtgattattatcaattcgaaaacatattatttgtcaatgattttgggctagctatcattatatggtgaatactataattcattctaatttaataatttttagaatattatgattaggaaactttcttaacattttttcgtattaacactactaaaaaattgactttttacaatgatagtaatggtcttttaataatggttatataaccatctttgaagtcgacgtttaaaaaagtcaatattttgtataatgattttcaaactatcttagaaatgttgtttttttaaaataaaaataaatgggtgtttttaagatgattgttacgaaaaattcatcttagaacatcaaatttctaaaacggttttctagaggccttagaattttttttttaaaaaataaaaataaaaaattgacgattctaagatgatttttaagaaaactgtcttagaatatttttgtaaaaaaattaaaaaatgaaggtattaaaatggttttatgcaaaaaaaaacattttaaaatgtagactttctaagatgatttaagagacggtcttaaatttttttaaaaaaataattaaaaattgaaaacttcatctaaagtcttttttaagcttttaaatttcattacagtccaagggtgaatgtaattggaagtgtagttaagaattgtaattttaattacaattttaaaagaactatctatatattaagattcataattcttaaattttgattgtagaaaatattttatatttgaaatctatttttacacctctaattgtaacattcccaaaattataaaaaatgtgatgataattggatacaagtatgtttagagaagaataactatatcacgctttccatgaagtagaaattactagaaaacccttaagatgaaaattacaaaaaaaaaatacccttggacatttttgaaaatgaccaaaatacccctaggttgaatggcataattaccaaaatgtccataggccaaaaatgctcaaataactttagaaattttgtagaaacttgatgaaattatagaatacacttagctgactaagtatcaacatattttgtgatacaaaactctagaataaaatttctacaaattttataagatgacaactttgaggctgtatttaagaaaactcaagcatcagaaaaacatggaaaaatggtacataaaatctatagaattttctcttaattataggatgaatagacctatttaataaaattgtttagtaattttgatggacagaagaagtatagaccaatcaaaaataagataaagatgtagtctagaatgaaaggtttatgtattgccctgtataagacttcttgggattaatttaaactattattgggataaattcttaggaatatctagaattctaatattcaaaattttctttagataaaagaattcaaattaaattggatttctttttaagaaaataccatattgaaattagatttttattcatcatcaaaaatgaccacatgtagcatgaaatgaagaaaaatttgaattccttccctttgagcttgtcattcacgtggagaagcatggagaatggggaagaagcttattgaatttagccacttgtagataagccataggatgaaaacaagtggcaagacacttgtatggcatggacgcaaggtaacataaaaatcaagccaagatttctctacactctttcatcttgcacgtggacagctatagacattatttcaacaatcccaatagtcaaaagttacatatgtgagatagtagtatacctttaaaattttaaagagatccaacggttaacgaacccagaattagaattttactaaaaacaggtttgggataaactcaagaatgaaagaaaaatcataaaagtcttccttggcaagctactccacgaaaatgcaagagaaatggagaaaattcaagagtttggacacttggaagcaaatgagaagaagctctaagatcatgctaagtggtaggacacttggaaggaagaaaggaaggaagccttaagattataacaagtgtagggacacttgtaaaggaataatgatggcttatgagatttttctctaagtaatcatttcttcaccactatataaagggaggaggaggaacctaagtacaagccaattccaagaccattcctttcttcaaacctcacgtgaactctctccctcacaccactttcatttcatttttccctttaaagcttaaatcaagtaaaccccatcaccttgaagaaattatgtgtagagacaaacaaccttaggaaggatttaacaagcttagaaggatatcaagactcaaactcacttgaggtaggttaagcttaaatctgtagttaatcaatggtttgaattaatttacatgcttagtaggctgaattatggttattatttaggcttgaattttgtgctatttgaaggttattctttgatgagaatatgttgatttaagccataagatagatgatgatttatacccatcaatattagtgatgtatggaagcctatttgataatcttttgaaggtgattttgatgatattttgggttgtctgttgatatttttatggaaagattttgatttaaattttagaagtagaggatgaatggtataatggtttaaatacttgatttgatttgaggattaattagtgaggtggagggtgaaaggagaataaaagatgcatactaggctttaatcttttattattaaaatttcaagggattagaaattatttgaaagacatattatggattattagttagattgctaacataattttttgtgaggataatctttggtcatgcctaagttggtaatgattttgcttgaataagatatagcggtttaaccatacttataagcttattggataaggtatggtggtgtaaccatacttatgatacatatgatgaaaatattttccataaggtaatatgtattttgcttatggatttgatttttttatggaggttgatgtgaataagataggtggattcatgtttccatgttccaagtccagtacgaggctttgggaaaatagaatctgatgctacatacagtacgatatgtagtacccatgggcaagggtatatggcaaaattcatgcatctttgcgtaagactatagcagcgaccatattcaatgtggccacatacagtacgatatgtgggagccatttgccctgagatagttcatctcatgcattcatgtagttggatattgcttttggatgtgtttgattttttttttttttttatgattttactaacctaataataggttcgagatttagctttacctactgagaagtttatttctcacccgatatgtttcatgtttttttttagatggcaaggatggacatgttccatgaaattttgaagtagtgaagaaatataaaagaagttatgtaataaactggatttttgataaaataatgtacttgtattatataaatttttatatcagatacattgactatgtatatgagtaacaaatcttttgtaaattttacatttaaaaaattttactattatatctttcttaaaaatttatccttaagtaaaaaataaaaataagtaaatatttacattgattcgccaaggtaaggtttattgaaaaatgaagttccacattggtgtgtaatgagtcaacacaagtgaatattaaagggtgaatataaaatagctctgacatataaataaagggtgagatggtctaattgacggttatgatatttaatttgtgatgactcatttaatttgcacgcatatattaatgagtttttttttattaattcaataaatggtcatttattgacttttggtaatttttcttcaacttaatcgcatcttagggtcaagttatatctcattttttatgtgtatatatagaaggattaagttacataaaaaataatgctaaaaaagttattttttatttttattattcattttcttaaaatttaatcattataatgagtaattgatcttaattattagattttaagaaaatatataagatgatttattcttgttctaacttgagccctctccctctctatataaatttttctaaactgtgcaaataagccttattaattatccactcttcaattaactaattattatgatttcttaaaaaaagtgattttcactttgctattcctttttcagacccatgttgatataatctctctttctagcaataaaataattaattaatacatattcacggcctctggaaactgtccaacttaaatattctatttgaaccattttttgttggcacattagtgtgatattttcccagctgcaacaatgcttatgaaaatgaaagttctccttcacagcttcacacattcaatgaacatatgccaaatagcttggaaaagtcacaatcacttagtgtagattttataacatcgggacttcttcatcaaagactttttggaagttccaaagcaacttggttaataaccttgtactttagttgtagtgatcagagagtcctactcgattgatgaagactattttggtggagtgaaacaattgtacagttttcaaagacggtaaatatgtattaattaattattattttattggtaggaggaagagaaagattatgtaaataaattagatagagaaaatcacattttttaacaaatcataataattaattagttgaagagcggataattaataagatttatcctttgtaaaattgcacaaattagaaaaatcatatatatatatatatatatatatatgtagagtcaaattgataaactattcttttgtgaaaatattaatattaaataggtaaatagttattttcgtccttgaatatatagagtaccgacaaatctgttttccaaagataaaaattcaaatttttgttcctgaaagaaaaaagtgtgacaaatctatctgtcaattaactcctgtgtgttacagttaatttctagagacgaatttatcagtactctacacattcagggacgaatttgtcagctctccacacaaaatataatttaatcttcatattctcccttttctaatattgcaaatataaaattatgataaacacttaaaaattaggaaaacatgttgaagttaaaacaaacataataataagtataatattgattaataaacataatttgtatgttactctaaaatttctattataacaacattagataatgacaaaattaagttgagtttcattttttgtaaggattaatttaatgactgtgcattttaatttgtttgaacctcatattttggataaagtattatctcatatttttactttaaattttttaatgtgagagtaccttacccaaaatatgagatccaaccaaaaatgcacaaccattaggttaattcttacaaaaaaaaatgagacctaacttgattttgtcattacctaatattgttataatagaaatttgagatcaacaaacaaattatgcttattaattaatattatgtttattattgttatggtaatttcccttggcccaaaataaaaggctcatttatcttattaattcaaatacctaatatcttaaccatcaaaggataagaagatatgacaaatattataactgccacttatcagttattcagatagccgaaggtagtggagataacaacactatagccactaaacccactatcagtcaatctccatatacagataatggatgaggctcactactcaactaactcaggtccttattctcaaagctataaataaggacatcctccatggagaaaggtacacatacacatacattctaactccctctatttcaattacacagagcacacaccccacgtcaattggtgtatctctgtgatcatctgcttcaaggtatcattcaccattgatatccttgaagttgcagagttagagtgatcaaacaacaaccatacagtactttcatactgtacatttgtgttctgggaaacgtacagaatattggcgctgtctgtgggtggatttcgagagaggtcccataatttttacttatcacattaaaaaggcaacctcatcaatatagaatgtgagattcaccaacaccaacagggaagccaggttggcatatgctcaatatcactttatgagggtggatcttgtctcaggagcggcaacacagattagattaagcaaaagctaagtcttctccctcttttctaatatgaagcgtcataaataattctttatagtattattataataatgtatgtgtagaatattattatttttacatgtcaaataataaagagaaattattgtaacgaccctctaggataaaaatggttaagttgcaggaattgaatcttgagggtaaagcccaagagagggttaaaaactcaagaattgattgcttgagggtaaagcccaagagagggttaaaaactcaataattgaatcttgagggtaaaacccaagaaagggttaaaaactcaagaattgaatatcttcattaacctcgattcagcgataattgctagtacagcttggtaggtcagagtgctaaccaaccaagctggggggcatctgttatggtaatttcccttggcccaaaataaaaggctcatttatcttattaattcaaatacctaatatcttaaccatcaaaggataagaagatatgacaaatattataattgtcacttatcagttattcagatagccgaaggtagtggagataacaacactatagccactaaacccactatcagtcaatctccatatacagataatggatgaggctcactactcaactaactcaggtccttattctcaaagctataaataaggacgtcctccatggagaaaggtacacatacacatacattctaactccctctatttcaattacacagagcacacaccccacatcaattggtgtatctctgtgatcatctgcttcaaggtatcattcaccattgatatccttgaagttgcagagttagagtgatcaaacagcaaccatacttcgtactgtacatttgtgttctgggaaacgtacagaacaattattatgtttgtttttaacttatatttgttttcctaatttttaaatctttattgtaatgttatacttgcaatgattaaaagaatataaagattaaattatattttggattgagagctgacaaattcgttcatgaatgtatagagcactgacaaattcatcccttgatattaacggtaacagacggaagttaacggaggaatagatttgtcacacttttttcatttttagggacaaaaatttgaattttcatctttcggagatgaatttgtcagcgctttacatattcagggacgaaaatgactatttacctattaaatattacatattaagaagttataatcaatatagaatgataacataattgagtttgatatgttgtagttagtgatagtacgttggtcatataaattaagtaactactttttaacatcacaagatataactttttatgtatacatccttatatatatctctttgattttgaaatttttatgaaatctaaaatcaaaatcatggaagatgatcatgcaatttaactataattgatattaaaataaaaaattacatattattcttcatttttgtaatcaagcaactattaataagataatattaaaactttttgatgattcaaaattgttccatcattcaaaagatgataaataaactgttttgcaaattggcaaacattttgtaaaacaacaaataagcataaagaaactatccaaatgttccctaatgaataactctaactctcaacttaaaggaattctgctgataacatcgatttcaatgtagtttcctccttgaagtttgtttgttgcacaaaatttgctccaatcctttttcaatgaccttcttcctttcttctgcctctcctcattcctcaattaaatttccttccgtgttcatcctgaatctccaaccttttcaaagaatttccatgaataaattttaatttgtcaccactttgctgggagattatgtattaaatatccagaagtcagaagagcttattgaacttatgatttgaacttaaattgaaagacacaaatataaatataacttaatatttataaataatttagcagaaccacactaaaaaaaatagtgctttttttgaccattttattttgacgggctcaacaaaccgtcataaatgtacaattttttattttaaaaagctaaccacattacgcgtgtcatagtaccggtcaccaatttcaagattttaagtataatatattatttaaaaaaaaaactgcaacagaccttaaccctatgtttggttgcgaaagaaaaaaagggaaggaaagaaaatggaagaaaaatttcaaaatttgaattggaaagaaaatgaaaggaaggaaaaatttaaatttttgtattaaaaataacttttctttccattttctcttcaaacaaacaaaagaaaatattttgttaatcgtgttttctttcctttctatttatttctttctattttctctccgaccaaatggaccctaatggttagtagagtgactgtagcgtagcaatgttgctttcgcagtacttcaaatggctgagaagcaatctcagagataaaatcacagaaccggagtgaaagaaaaagaaaacgaaagagagagaatttcattgactgccattgaagctttgcttcttctatctctcagtcataacgaaattccccacacattcttaatttcctcattctctccaatttcaacactgttacggttcatagttcttccaattaagacaaaatttgaggtgtgtacggttcaattggaccttctatgctgcgttttgttcactcaagggaccaagctccgggaggattacgcggtccgtgcacgacggcaccacgctcgagtcaattcaattcaatgaagaaattcagggaatcatggggccggtgccggcaccggaaaacgcaaactcgttcaccgcgctgcttgaactcccgtcgacgcaggctgtggagctccttcactcgtcggaatccgatagcgctcgaaaaccgcctatgcctgtgagcgagtgtgagtcatatttgagcttaaaccgtagccgttctcttcattcttcactttggtaattttcttctcttcttcacctttctcctatttgagcttcaaccctatgtatgacttttgtaataaggttaccgtttcactcgagttcattctgtttctactgatgttgatgatgacattttggaaggtaattgcaataggcttcacccttattataagctagtgatacatattcatggtatgcatgggcatacaggtaaataaagacaacaaagaaactaggatctaacaaaatggatgcctagagcatcagtaaacagtaagaatagagctgaataagtatatactattgatatacaaataaacaaccaataattcataattatattcatatttgaataaatataacctataaatttcgtaattgtatataaattttaattataatagaaaaatattttaaaacaatgcgtaatatatttgctaaatgaaattcaaaatatataccttgtaaatatccagacgtcattcagagattcttcagagttttagctatttgtgacacaactattccagatgtagataaagagtcaagagaaattttctatgaagctgagccacgagatgaagcgggttttgtcatagctgcaaaggagcttggttttgagtttttttgcaaggacacaaacaagcatatcgctgcatgaattgaattatgattccgatctccaactaattattttgtcatatcccaattctaatgctctacaactctatattaggaatcaatcaagaaaggatttgctccaatctgtgatttcgttatgttccctgtcatatcagaatgtaattttgttcccataaatagctagaaattgaacgcttttgtttttttgtgtataacagggagacaaagggatactgccaatcctaacttatagtggacatctccctcagtggactcgatattttccacaagctaataagggtatgtagaatcatgctttcatttataaattagaatatgcaagttgttgaaaagagtgaaaactgaaaatataagtgagtatgtgacttcaaccattctttttaaattattagaaatattctgactaatcatgttgtttgctcctcatccttttaaaatatcttagatatatgctcttatctccctttgcatttctgaaagtttcggggtcttatctccaattgcaacagactaagtgggttggttagttggtttagatttgagcaacaacttttaatttgctacttgtttgcttatgagtggcatcaaacatgtgttattttgttttttttaatagtattgtttagaaaacagttatttcctttggacaatcctagagataacagaacataaaccatgtaaacagtcatttcctttggacaatcctagagataacagaacataaaccatgtgaaaagttcaatcttactgtttctgatgttgaggtttcattcaatttccagcaaactgatattccagttttcaaatcaattgccagttatatagataaccaagtctaaattttcccattttaccttgtctacattgcattgaatctccaatttgagatgtgaattttctttttgcatgatttatagtatataaactcttcatcaactcaactagtcctcacgaaaaggatgggtatatatgatccattccatcaagtgaccatgcggggggacatctttaaaattgatggaagcttgaactcaattgctccccaaatgttaatgattaagcctagcatgcagaacaaggtaagaatgtaggaatttctcttttgttagcgagttagcattgttttgtgggaaaacttgtttacgaaagtcttttgaattttatttgtccagtctaaatgtatgcctcacgaatcaagggaagcttctggagatgatcaagagactaatgaaaaagctgatactaaggtaaacaaatttcatcaatatatatttcttttatgtatttccttatcatctttcccatgcctcactttaatcattgtaaataacttggaaggaaacatgttgatttccttcacatatttataccttgataagaaactgaaattaatgctttggagatctgatatcaaacatgaatgtttttatttgaatctgtaacaatgtagttaatgaatatttatttgtaggcactaagacatcaagctcaaaatcgcgaggctgctcggaaatgtcgactgcggaagaaggttgtaaaaaatgaatttataggaagttagccagtgtttataatttgattcttactcatgtaattcataggcttatgttcaacaattagaaataagtcgtgtgaagctcgtgcaattggagttggagattgagaaagcaagaaagcagcaggtgatcctaactgaaaatcatcattttcatttatgcattgtatttaattgtaccgtgtttaagcacgtactaaactgtctacttgtagggtatgtacatacgcagtgcactagatgtcagttatatgggatcatccagaacaattaacccaggtttgtgattcaaaatttcagtattaagcttcctcaattttcttattttcttagttatttacttatttgtgaactacttcttgttgtgttttaagatgcggttgtagtttgattaatggtttatgtttatggctctattagattttaaagtcatacctttttttatagaatatcctaatgttaacacttaacggacattttttttatagaattgtcaaatttcatttaacatttatcttgtgattacatagtacttttcattagtgcatgaagaaataagcttatagcatgtggcattatttaatatggaactcctgctttcaaggataactttgtttgaacttgaatatgcacaatggattgaagagcaagatagacagaatcaagaactgagaaatacattacaaactcaagcatctgaaatgcagcttcagcaacttgttgagagttgcttgacccactactcaaatctttttagaatgaaagcaaaaacatttgagtgtaagcttggataaaaattacgtttgatatttttaatgacatatgttgtaatattaataattagaataattattatagtattggaatttgagagaataaaaatttaatacattatctcaatttttatatttaatcaaataggaatgaaaataattatagaactaatgaaaatgattaaaactagagaaatattaatgacttttttttataaaaaaaaatactgtttttaacaaaaaaaaatgtttttggcaaaaaaaaaaagaaaaacgcactttgtagcggtttctgaaccgccataaatataaagcgggaaaaaaaagtgaaaattaattttgtgacagcttttagccgccacaatgtttttgacggatttaccaacgttccactgaaaatcgccacaatattttctgacgttgttattttttacggtcaatcttgatcatcaaaaattaattttgtggcgatttttaaccgccagaaatcgcttttttagccgccgcaaaaatatcatttttttgtagtgccatgttattgtttcttgtctggatgacggataaagaaatttgaaatgacatagtaggaagttcgtcattagcctcaggttgttggacaccaataataggttgagcagcaggttcatcagcatggttgacttcatggagggcatgaacaacttcttcaagtagtagaggttgatgcaaattaggaacaactttaaaaggtagttcatcttcaatgactattgtaacaccttaaattcttttctcgaaatttagcttcaaaaaatatttaaataataaatgttgcaaaatgtgtatcataacttttaatttctatttttaagttggacaaatatctcatcaattttttctatttataaataagaaaaataaaataaattaaaagaagtgtgttgcttggaaagcaataaattttcacgtctcaattaaatccataaataaataaatgtagatttataatacaaagcctttgtacataaataaagcaaataaatagtgtcatagtagaagaaatttatacaaaccaaagtgtaaaagtagtgaagcgatcgatttacacctgctgcataaaaaagaatacatttacagtgaagatcctacccctcaaaatacatcaaaatataaaaaagaatcctaggatcatagcaaatcaccacccaactaaaattattgaactacacctatggtattgattgacacaggaaagtagtcaatcctcctcctcaaatgaagactctaagtcttgtagaagatcacaatactcttactcctcctcaagtgtcatatcagtgtgatctccccaatcctcaatgacttgcatgtgacgtactaacttgagtctcaaaatgatagctataacgaccctcacaattaagtgctgagttttagcatttatgaataaggtaaagattatgttaagtgttaagaagtttaattatgccaagcaagtcaagtaaaactcttagaagataatgatataagttgtaatgacattaattgtaagagatgatgattaaggtttgtgattaaagatctattgcataagtatattgaagggacaatattttggtcttctagtgtaagtaacacaagactaaaattacaataatgcatgagaataattattctaggctcacaacttaatgttgtgacaatttactgaaatttctagtaaggttcattaaattatgatgccataagattggattcctatcagctatgtttttaatccagcctatgtagcccaaaaggaagtgacaatttaattctagtaataattagcaataatcttggtttagccaattaaaaatctgagtatgtaattactcatttcctatactttgttcagcccttgcatgttcagttgtaagcctttagagtattaaaactcctgaagtagctcagcccacgttcaactacttccacttttatttaataattttctgcagcaaatgttgaccaaccttgtctcccactcagcaccaattatggcaattagtgacttagtccagcctggtttttccactgagtatacctaacatttgaaaacatgtagtctgcctctctaataattaaacaaactgccaagccatatcccgttagacagcacatccttccaaatcccattatttttcacagctggaagcttccccactcataattatgtgcacttagcattattagctcagtttttcagactcttctttcatctcttcagcccttggtcgtgcatctctctactcacaaactcatagagtgattcgtctcattgtttagaaatctgttctgagttttcatgtttgggaacacagccttacctgaattagacctcaagccttgaagcaacagctcttctctttaatttcattcagttctaagtaggaggtaaatcaattctgctcatcctaattatattcctctttcctctcaagttataatagagaagttctgttatgttgtagctcataatcatctagcatctcttggaagttggttttaaggttcttcactctttatcttggtcttgctactggaaaagtcagtaatctaacaagtaagtttccctccttaaccttattttcgttggatttatgagagaactttaatggtccagtacagatcagaattaaaagagttatgtatagctttcaacttggccaataaaggaagatctatgtcattaatctataaaattgaacacaccttggtgacccaagctttgatttgatccatacacgttcataaggtcatgatttatgcatttaacctttttgaatccaagccatgaaatgtaaacttaagaaaaagccaactagttgcagaaaacaagcgttccgtcgttttaatcgattagatccttaaaataatcgattattttcctgggaaaacgaaatatgaacaatataatcgattacaacatcggtttaatcgattaaatcaagcttgaaccaatttccagattttccgagtgactggtttaatcgattacaagtgaagcgtaatcgattacatgctaaattaaaagaaccaccttctctggattaatcgattacaagaggacagtaatcgattacatggttaatttgaagaagcatctctctgatataatcgattacggcacggtttaatcgattacaatgactgttatttgagatccaatgttaaaataatcgattacacgatcagttgaagcatatttaatcgattacactaggtataattgcttaaaatggaaaccatgtgcctttgtgctcaaagactagcagccactaactcatagcttcaaaaccttgggttctgagcattatctagacattttcctaagttcttgtcagtcttgtttccagtatttcgcttaaagaatcattaaggtgttagtagcaagctaattcactctcaagtcttagaaaagctaacctatatcaattggtttgcaatttcacctaagttttattcatattcctaccaatttaggatcagtaggtaaatcttttcctaagctcttgggaatgttaaatgaatctcgagtaagattataagagttattaaggaaaatcgaagtaaatcataacgaaatgataatataagagttttgaattgcgtattggcataataataatattaagagcatgtggataagaaaaagtgggaatcaataaatgaaataagccttgcatgatacttgacttattatgctataagtgataatgtgaatgattcctacactaggaccacctagagaagtggacctttgaggagctcaactaggagcatacattgaaattacaggtaagcttctggagcttactttaggctctttttctttgaagtccaccatgagtcacatcatggtgtattgatgaatgatagtggaatgatatatatatatatgcatgcattctcattcacatttatctgcaaaattatatgtgtatgcactgatatgatgataagatacaaggaagtaagtcacagagatgaagactttgggttcaagtcccaaagcacctttttgataagactttgggttcaagtcccaaagcaagagatgaagactttgggttcaagtcccaaagcaccttttgtcatgacaattgtaagtccttggcagaggaaccaaggcaatatgagatgggtgtagagtaagacttcgggttcaagtcccggagcatcaaatcaccaaagagaaaagtttaattgcttgcgttattattatattgcttcttttatctgtatatttatttatatatctgttggtattacatacttgttacggatatacatattatagactgttgcatattatttatgtatctgttagtattacatacttgttactgttttatatacatttattatagactgttgttcaaaaagtgagttcagggacttagaggtttctttaagccctgaagcttactgagactcgggttgtctcacccctttgtttgggaatatcatttcaggaggagttagtagcagagatccctcttctagcaagactccattgggtgcttgatggagtagctatagctgttgtttcagattagattatttccttgcttgcgtgtgacgtgtgaggcgtgccgtttccagtatgctaggattactgtactactgttgatcagttgatcgataatgtcttgttgaaactaagttgtttgtgtgccaccgtcaggagggtggatagctatcatgtataactcgagagctatatatatatttgaagtattcagtttctgtattaagtgatgcatggtgttattagttatattttatttagcattgcaacatcatattatgtgaacatattgggtaaagtatttgagaaaatgttttggaaaaatgtggccacgattttttatactatacctttaaaaatgattctaaaaagtcttccgctgacaactctaataccaaagataagtaacaaccagagtactacggggtgttacaatagccaagggggtcatcaagtgtcgcaaagccttgtcaatttaagcctataccatagcttattggtccttctgagaaaaaaatctattggagccctcattctttcattttgcatgagttccatcttgagggagcagagttcagccttgcttcttcttcttccaagcttgttcctagtgttattgagcttttgaatcatcaagcttagttaaatgagttccattcttcatcctagacttgattcctcttcattctcttgttctagcttttctaataacttaaaactgtcattttgttttactcatgaagggaaactttgaaaactaaaaattattcattattccttcaagatttcatgagttcatcaacaggtaagggggtctctccaacccttgaaccatatgtttgttgtttaacttcctcaaacattttattttttgagcttgtggtcatgacttgaatctgtgtgttgagctatttttcttgagtttttgatgcaaaaaatgaattcctttcatgttaaaacatagggatatcgttaaatttcacctaaattggagtttcctagtaaaagttacaaataaaacaagtttaaggacttttagtaaaatgaaaatctgtcacgaacttgtaccaagagttacaacaatatggaccatttttattaaagttttgactcccggaacatcaagagcgctaaaaataagttaagagcaaactttgaaaaaccaagcgacatagtgattttagatagtagatagcttagcattggaattcatgcctccatataaactatcttagaattatttattttctagaattacttattgatttactattatattgctgagataaatgcaagatctgatgattgatgcatgttttgaaattgtaacaattttttgctgataaaattactaaaatgtgtctatgtattttattattatcattattattgaataataagactgacagagtgtgaactccaacattcatatctatcgcatgcaaaattatttctattatatacatgtctgcatatttttatccatacactgtggtttaggtgcagaagtgttcaaccctcggtgaattgtttgttatgtttgcttagatggcgataagtacaatcgtaatggtgtccaattgtttgtgtgtgacaagtggttcaaccgcttaaagggccacaattagttccctgagagtagtatgtaggcccgagcctcatctttctttcttgtttgcttgtttgtatgcgttggttgatgtacgtggtacaagaactacacacgcgatgcagtggcaagattcaagaggactggacagaaagtaaggaatcaatggttctatttccttccatgagaaagtgaggttactttgagaaagtggttgatggatagagatacactggggtgtaggtgatgtgttgcaaacacatcttatttttagaatagttttagcttatattttgattaaataaataggaattagtttagttttagttagtttattaataatattctattttatctcattccaataccaattatgcattttcaggacaaaagaggagaataaaggccaaagaaagaagaaaacaaattctggagtatcacgcgagtcgcgccaacatccacgcgggccacttggaagaccagagaagatcacgcgggtagcaccgttactcaagtgggtcgcgtgggaacttcaagatttaagcatttcaacgctgctattccacgcgacatacttggagtatcacgcgggtcgcgtgaagactcaaagaaataaggaattctcttctgttactccatgcgaggcacttcacatttcacgcgacaaacgccatcttttcggccagtccacgcgactcgcgtggaatcgcgcgcgggtcgtgtgaggttgatgctgtttccttatttaaattatatattttcagatttgatattatattaggattagttgccttaattaagtgattttataaatatatttagtttccttaattaagaagatttgatttagatttggaacagaaaataggccttgttaccttaattagatctatctataaataaaggcctctggggggggttcaagacagacagacactgacacatcaccttctatcattcattccactctctctttctcatattctcaccattggaggtcaagaatcaaggcaaggtcactcaagaatgttctatttgatagcttttggtttcttgaagcctatggcaggctgaacttgtattgtgggaaggccatgaactgatgtaactcctctgtaacttgaattggtattgattctaatgctgttttgattattttattctactctatgctatttaatgttttattattatttggaattggccattctatttaagtattgagggttaggattcgcaatggacacgttgggattctaatttctgacatgtttagaataatagtcgttcttcgcctagacatagggatgcgtggctacggattttataatatgttctttttcatgcttaacttaatagaattcaccaaggaattgggtttttgaattaggttaaagggttaattcactaaggcattagggattaactaatttagaaaagacttattttccgaataatcttaacaagatcacataagatatattctttgaatacttatgacagattcactaagggtttaggtttctcgatcgaattaaagggttaaatcgctggttatgactctagtagttctaggatttacgaatttaggaaagatttatcatgtgtgtgacttaagataataaaccaatcaagtgaaggaggtagggacaaaagagattgtgcctgaccacaattgtttcttccattggtaacttctttatctttttacttactttaatttctgtttttattcaaacaccaaccacaactcaacaattacttctttgttctttatttttctgtttttaaattccaatcatttagaattaatattattgtaaaaatcattccaatccctgtggagacgataactcacttacctactttattacttgttaacgatcggtgcacttgccgtaaacatattcgcataaatcgcgcaacagtagggaaattagcaagtggtgactactcagcatttggtgtactcatttggcatgggtaactcataggccttaatttgctacttttgtctcaggttccgacactatgctttttgagtttggagatgcggggtcagtgtactatgtatccatatgtagcgaccactcacaattgtcatctacacaattttttaagaccatcaagacccgggagaattggtgacagtgattgggccctattgtgaattaagtctgatagttacacgcttaggatgcaagagtgttatttgataagataaccacacacaatggttatgtatattgtatgttttaaattttgttttgctattcctattgtttgtggcgtttgaggaacgaaggactcacccttgcttgcaatcaccaatttcacgggaagatcatggagcattcgcagaggatgctcatatggattagtagctataataatagctacacgatggaggaagaggcacgcctccacgtgcatttgggatacatccgatgccatgttttgctattagacgagtcccatatgccactgatcaccatcgaggcaaatgcttcatacaactactcgttcaagtgtacctctcaatgtgatactacccatatcatttcctactacgcttattttggatttgcgcggccagacaacccattgcgattcttggaacaatttttcgagcatgatgccaatggaaggactactagatctacctttcatcagaatacgaccattgaaattcatgaggatgtgggagattttagtgatgatgaggatcttagtccgttcgagatcgttttctacctggatgtcatcggtgaagagatatctgagggagagatggttttgtccgacgaggaataggattccttgggagacaagagcgaacctttcaaggatatgacttcgccttaggtagctatgggtcttggttagtgattgctcttagtgtaggattgttctttttttaatgtatatttagagtgggaagatttatataatcagtgtcgtaatattttgttgtattagaccttttagtgatactatgtgatgttttgagggacgttggttattttattgttaatagttgtaatgattccgttacacgtatgctttaatcttaagggtcactaagactaaatatctatgtttacttatttcttcaagtttgtccttatttaattttgtgcaaagttatctctttataatttgtactttattatagcgttgtgtaaggacggaagaaaaaaaaaaggcaacaacttttaaaatgtctttttgagaacacatttggacaataccctttttcaagagtgttttaattatacgtatattttttaatcaggcgcaatacatacatacatacatacatacatacatacatacatacatacatatatatatatataaacttaacacgtactattgacatctcaacctttttttaccagtttgatcatatattgagttataggcattattttttaatgaaactaaagtcattagttagctaacatataggactacaactttcatgcaaactatttttcttatttctatcattaagttcaccagcaaatttccccttgcctggcaaaaattgcatttgcccagggaaatctgcaagtagttcacgttgtttttatatcaattttgcccccaacaaatttttgcattttccaacaaaagttgtctcatagagagttgtgattctacattatatgttcccaaaggttcctaaaacttcaaaacacactctaagtatacaggaataaaaaaaaatgaaaccataccaattatagtagaattcataaattagtcataggaaacatcatttaaatgcatccaacacaatttcacacaattcaactcaaaggacaaaaatgggtaaaaaaaccaagaacaacaaaacaaccaaactatcaatccaataccaaattaaaatgctttgtgtattcacaacctgtccaatccaaggaaaaaaagggatgcactttacctaaaagtcaaagaagagaaacacaaaccatagacactccttcaatcttgattcatgtctttgatggggctctatggaatgatctttctgtttcctctacattggcaccaaaccgagaagaaataagaaaaaggaaagaagaaagaggtttagggtttaaacttggggaggaaagaaaaatagttttcttttgggtatatgttagagacttaactaaaggttatgaaaaaagctcatgggccacaatccaacaattaatgtccaactcttggctcataaaactcttcatatcttgctcactacataaaacctatttttaactccaattataattccaaaatatcacttatttaattaattactgaaaacatttacaaatgcttatattgtttaaatcaagctaaaatataatagcagttatacataaatgatttttgaggtattacactcaataagcatttcaacattatcactaaaatatggaacatgttttcattttcttattgtaacactaaataaaattatacaaaaataattgatgagttgatgcatattgttgtttgtggatgaaaatcacttttcccctctaattagagaactccacatcaaataaaaatgacacctcaattttatcttacatctggagaacattaatattgtttatgtttatctttgcttcactttgatccaatcaattcaacacatctccgatatcagaatctagacaattctcaaaactcattttctttttacttgttgtgtacttgagctacttaatgtgaattcttgaacaaatggttggattaaataatctaggagaaagttatatttaaggttaaacacaactttggccccccatttagcttaactcacaaattttgtccaatcttcaattttgtctacacttatttcatttattaatttcttacaatagttagatcatttcttgatgattacttatatggatatgttaggtttaggattcaattagaccaaaataaaataaataaaacatatgaaaaattgaatatgtgacctaaaaaccgattttcgaaaatagaggaccaaatgtctctattttgaaatagagagaccaaagttgaagattggacaaaatagggggaccaaatcaaagttgtgtttaaaccttatatttaatagtcctctttgacttcttcacgaacctcataaccttatttgtctttgagtcctcaatctttgatcatagcaccttaaccgtgttgaggaacttgcttacaaatggatacatcattatagttggttccctaattaccataattatggttaaacaccttgatgttatccttcctcatgcttgcaacataaaacttgcacacatacattcaaacaccacaacacaaagagactaaaccaaatgagtgaaagcaataagttacctagagaccatgacatatgaggcaagttcgatgtcatgaattttgagactagagaaggagaagaagctgattaagacctaaatgtcaaggggttgaaagacaaagatatgcaaagataacaaacgaaagaaagaaagggaggagccttttggtttccatgactacaagaaagaagtaagggtaaaagctttaaaaagcgaaggtggaggttttggactcttgcgacaacaatgagagttggaagaggaatgatttttttgcttttctaattgttttctaacctccggtctaaaaaaatgttgactttgattgtgacatttattaatgtcatttaattaacaatatatatttattattatggaatgcaatttttattttaatattatatgaataaataaaaatacacaaaaatagttgataatataatggtatattaattgaatcgtactatagattgtggacgaaaatcagttgtctcctccaattagagagtgctatgtaatgtcacctcaaacatttggagaaaattaatgctttttatgtcttgtcaccgcttcacttggatccaaccaatccaacatttctctcatttcaaaatatgaccaattcatagaagctataccatcttccttaattcgtgctcactactaaatggatcacatccctttcttcctctactgaccttggattttttttccttttttcaaaataaattattttaaaacatttaattataggaattaatagcatgggaatgagatctaaaagggtgagggtagggtgatggtctattacaacaacaattagagttctaagggaaataacttttttccctatttaattattttctaacctagttcccttggttcaaaaaaagtgttgagtttgatagtcacatttgtttatgtcatttaattagtaatatatattaatttataaggatgacaaagtggacgaatccacccaaaatggactgggatgacctagcccaccaaaaaaagggtcgggtcgaactggtccgcttttgcaaagtggactggaaatgctagcccgtcccactttaaggtgggtcagcatgccaattcacctaaaaaatataaaaaaataattttaaaaatgaagtaaaaaattataaaaaattacaaatgtaattaatttatgctaaattgatgcattaaattaaagttagcaaaacaaatagcaacatccatacattaaatttaaaatttgttaaaaacaagttagaaacattacaacttccaaaaaataacacagcctatgagaaagagattattaataaagattaaagagaaagaaaaaccatcaaagttataaaacacaacaccatgatttaagaaaatgtcacaattctcaagatgaaaaaccatttatatagaactataggcgattaactagcaaactacaaaaatcattcaccataatctctgcaacattcagttgaaggttgatttcatcggccattattcttgggtttatatagtgtagtgttatgtcttgaatcttgcatcagaaacaaaaaaatattccaggcagatcaggcatggaaacttattttgccatgtcatttgaatgcagcaatttcaacaaacacttgaaaaataaatgttataatgctataatacgagcataatgagtaaaggaataacttcaagttataatagacaatataaaaaaattaattacaataattaaaatacctcaaactataatttaaatcaataataattaaattaaaatttatatataaatatgtctagctaattttttgtgtactaagtcctcatcaccatcatgattgcaacttatgtaatcaaacctatatttaaaattatgtataactagaattaatggttttcttcgtatgtgttatccctccttctagttccaatagttttttatttactcgtctatatattttttactgttgaaatacacaacaactggttttcctaagccatattttgcagcaaattctatagccctagcccaccaacaaccttaattacataagtagccagaaaagggtaaagttcacaaattcaactggcgatttcttaaggtgccttcaataacgagtatgtcacaaaaattcggacgcaaatttcatccataaagtatagtaacaagcaattaacattaagatctagttctctatgttcaacaatcgattccaacacaatgtctgataggaaacttgctcgcaattgcaaaagacgcataacacaataagttcattgaaataggttggggaaaaggcaaaagaggaatgggagaaaaacgtgaacgaaccagatcgatgaacgcaacgactttctcgtagttggagctgtaggcgatagcattggagtggagctttggtgtagagatcgatgatgaaaaaacaaaggtcattgtaggcggaagctcagacaaaggtgcagagctcgactctcccattctcgtctccgatctctcactctcttctctctgatactctcactctcaacactcaatattcattattcaataataatataatatctttttttttattagaggtagcaaccaggcgctagcatgtattcattgtattgcaaatgttattggtggactctggcccgtattttggggagtcggattggccagacccgtttttcaatgtgggttcataatttctatcaaacccagattttttgtgagctaaacgggctagcccgtcgggctagactcgttttgccatccctattaacttatagaatgtgtttttcattttaatatagtgtagcaataaataaaaatatacaaaaataattgatgaaataaatggtacattaattgaatcctattgcagtttgtggaaaaaaatcacttgtcatctccaattagagagcatcacatcaattaaaaatatcactttaattgtacgttacatttagagaaagttagcgtcatttgtgtcttgtcttgtctcgacttcacttcaatccaactaattccacgtgtcttcgatttcaaaaattaaacaacattttcagaagcttaaccatttcttgtaatttgtgtccactgcaaactagatcacaatcgatcctctcttcggtttttgcatttttttaaagtaaaattaattttaatttttttgtactatttttttattgtattgaattttattatctagtctgattgttgaattggtttctatatttacgtattggtatcagtaagagctggacatgcatcgtttcaactatagtctactcatttcctttttacctctagcagcagtacaaactcatcaatgggaaacaacatgaatcgcaaacactatcatcatgaaaaacaagaagacaatggcgaatatgtcaaaaaagtattggattggttggattcaaaatgaaacagagacgatatacaaatatcttaatcttttaaaaacctggtattaaattgatcactggaatttttattaattgatgtgactcactctaataagaaggaacaaggatcgaggacatgattggaaacaagtgaatttcgtttacagtttgttctctggtttcttttcagatctttattagcttaattaattatacagtattagttcgtataaactccattttggcttagtaaataaacaatcaagccaaatagaaaaattatatattttgaaggtagttcagagagagagagagaaggaaaatgaaaaacacattccaaagcattcaacacatcataaattaaggtacatggactgaacgatcactaaaagccaaggcactgcagttacaaattaagagagaaaaataaagctaaaagactgaaaacatagaagaacaaaaaaaacaaaagttggccaaatatcctaacttcctaaacaaacacactttgagtttgatcagagtgatcttattaacgccaagtgccaagactgattcaaccatgatgacgaaacaaacaacttctaagcattcttcatacccaagtgatttggtgtttgagtttgaggcatagtgtgcatacggtgaaagttgcggtggcaaccgcaacaagcacataggagaccgtcctcaccgatgagatactcaagacaaccatcatgggtgactcggccaagtgctgctgcatagttgtacatacactccttgtaggtcaccacttcacctattggtagtgattggttggtgttgatattagacatggtgaaattaaggagtgaatggatggatgcttgtgcatttgcgttgagggagaaaggcttaaatagaatggtgatagaagaacatgagtgtacgtgtccacttgaaatatggtcttgatgcatgttgtgacgagtctccatcaactgaatcctaaaacgtgtcttcttacatcatatctatttactatgttataaaagtaagtcctccagatgtctaacatttcccattccaagtgtcagtatcttatataaaacttaatttttttaaactttgcttatatctttgtcttaatttctttctttttagtttggtcccttttaaaaattttctttctttctttttctttttatatttgtttcttgcttctattcttacagttttttttttatgtttattctctctctctctaaaagaaaacttatatattttgaaggtagattaaagagagagagaaggaatataaaaaatgcattccaaaatatacaacacatataagaaattatggtaaatggccggactgaatgaaaaatgcattccaaaatatacgtttctagcttgttacgattgttaagataatggcaatctctcaccatttattataaatatatatattttttagtttttattatagagatacttatccttttaaataaatcttttgaatatcatttattttcgtaattaatattttccttagatctcacccatttttatgagatgtaaataattatatttacaaaactttattagtcttctctttatattgtactagtataattttattataaatgattttagaataaaaaactatttattaatcattctcaatgtggtaagcttaattacgagcattataaaaaggaacgattatattgtttgaggtttaaaatacactaacaaaaattcttttttccttcactagttcttcgtatattccttttgtttttcttgtcgtctttattttttaggacattgattgtgattctcaaacgtgtttttaggctcgtgtttataagtctaaatatgtcactatatatataaaccttgagaaaaacaaatgaatatacagtttcacgttatatccttcaaaatttgcttttaatgtgtgattattatcaatttgaaaacatattctttttcaatgattttgggctatcattatatggtgaatactataattcattctaatttaataatttttagaacataatgactagggaattttcttaactttttagtattaacactactaacaatctgactttttacaatgatgcaaatgaagaatccttggaacatatccttaaccatatatccgaagaatgtcttcaattaaagattttgacattttcttttcagaaaagattgatggaaatataaacacattttttaagggtttcaaaaatattttatttcatcatttcttcaagaaaatcaagagtcaacaataatatttaaaatttcaagaccgatctattgataaaaagtaacatgaaaaatcataaattcttaaattatgctatgataccacatgtaaacaataatcatgtcaataacatgaataagttttttaagaattcatgagtttcacattttgtaaacaatgatgagaatactaatctttgtcaataattgatgacaaaataatgatgagggcactaatctttgtcaataattgatgacagcaaataaaatgacttttgagagtaaactagtgactgaaaactcttcaacgcaatagttattctcaatctcttcaccctcttattcttggtcactcttcaaatcttaatgacaaaacttagaacattttctttatggacagagatgaagagttttatccaagttactataactacttcttcaataacctcccactaatcagaccactaataaacaaaattatttttaacccttcttatattttatttatcatataagtcacttcttacggatatatctaacaactcctttgtataatttatattgaatatggaaaacatgatcattcatagcatatgcatagtcagaaaatataatatattaaaaggttctaacttaaaaaggcaacaacttgaaaattaaaataggtaaatgtcattataaatgcacaaattactgcatatccattatctttttcaatcttcacaacaactttcactatctttgtacttgacttgtcttcagtttctccatcagattcatttgatatttttgatcgaacaaattaaagtcaacatattcttggctcaactcatgacgaacaggaacaacatgttgtgtccgctttcatgttcaatatttgaaaatttttccattaaatcctgtttaatgaaaaataaaattattcaattagaatcagtgttggcaatttaatgaaaatttgattgaatgataagaattagacagaataacataatgtctgtccaagtgcaacttctctatcgacaaaatcattaactttctcaatacttgagtaaatttcccacaaatgatatcaagttcggcatttgatgggtttatgaagcgaaacattttctttagctgtcggggtagaatagacagactcctaggttaggcctagattgattagattttcacactcagcttgactttcagtaagacttcccaaaggttttccaacaagatcctattagacaaataacataaaaacctcattattgaataaacacaaaaacaattaaaaaattatattgaaactgtaaatatgttgtacacaacaacctcatcaatagaatcattagaagaaaacagatctttgaacttctgattaatttgctcatttgtgcagactttcttcacacggtacgatggctcaaatttgaagttaaccaagttttttatcccaaccttaaaagaaaggtcttgtccaccaaattcaatatttgatatggagaaaggtccagaggtctgtatgaaaagaaaaatagataatctctaacaaaacatgaatttatcaagtaagtaagcattttttttataaggacactgcatatttatacttgttctgtgtgttcaaccatttcagcacacagtttctataataaagcaactgtatcacgatcaaataacacacagacaatagaatttatcatctataactcgaaccttgatacgataccttcataaaaaattaaaaaaattaaaaatatagcactaattatagcagcattaatttatgatgataccaaacctgggaagaacagttaggacatgtttgttgcattgctcacaaaaattcattttggaatctggttaaacaggcttgttgcataagagatttcctacatataacagttttatagtacccaacagtacataagacatttcctacatatagaagtttaaatattagcctcatgtctccaacataatccttattttttaagcaacgtgattaatggtaatatacatctttgatatttttaagctccatgattgacttccgtggagtgttgtttagaaattcaacttcaaggctgattttgtatgtgtcacgaacctgactcaatgtctgagcaggagagtcattcgctgcaataatccttaaagattaaaaaaagggtaggacaagacattgctacaataatttgtgtaagtttagataacctacttttgtttgaaatttgcaaccttttcacatgatgtacaacagcttcatgcaattcattgcattctaaagagaaattttacctaagaaaaaaataaaatacagcttaataaaatattcattttccatttgtgtttggcgttttgttttttaaataaacctttaaatctcttcaaatgggcatgttggataataacaacaggtacttcatctcgagaagatgataaatataagaattaaaatcattaacatagggccaaacaatgcaaattcaagtttgtatccatcacattccaattcaattacattgaacttgattgcaacatcatttttttcatattccttttcaattccgtattaagtaaaagtccttgtagaggacatatcatatgagaggaagttattttatataagagtgagatgatcaaatcttgaccgtataaccaaacatgaatgattgagatttaatgtcaaaaggtcaaatgaatttttaaaaaactcattactttttaagtagttacatgacattaaatcttaatcgtctatgtttgattatatgatccatatttaatcatttcactctcttataagatagttttctttcacatgatatgttaaataaactaaatgttaaattattgctttaaagtaaaggtaaaaaaacattgtcgtaataaaatttattgcaaatatatatagtttaaagaaatcacacatatcaactaataaaaatatatatataatttaccatacttttcttttgaagagatttttagatatttttaatcaccaataatttatctgctattgtgtcatccatccatatcttgattacaacaagtcatgttttaaaacatgacgacaacaagtcatttttctctttttgttattccttttccaatttaccctttaattttcttttcctctttcttcttcttcccttcgttctctactcccatcccctcaaaaggtttcgtcgtctccaccatcgctgacgattaatccttcatcataccaccataattctttttgtttcacttttcatgttcccttctcttttacaccgaccaccacactctactttgggcctccttcttcttccttatcccacaacaatagatggtggccatggcaacaacacactatgcaccgccacccccacaaaaatatgattatagaaaaggataccaaattacaaaatattacatatctataaaaaaaattcaagaaggaaaaatgaaaataacgtttttgttcaatacattgattaaactcaaatctcgagtctcaattctgtaaaacatgtatatcgtccacatataagaaatgaatacatcaacaacaaaaatacactaaacaaagtaaagacaaatttgaatagaaaaataaaacaaaagaagcttcaaatctggaacccattgctctcaggaagccaccatcaatggtgagccagcaacatcctcgccatcatctttggcaatcgcggcctctgcgggtagtgatttgaacaatttttacatgcagaccctagtcttcatcttaaaacattaattttttttggatcaatacataactagtttgaaattgatcatgaatcaataacttgagacacgtgaccttatattgaccttaaggacttatttgtgttgtatacaagacttctaggatttaataagctagatcctcctagctaatcactatcaaataagggtgggcatacagatcagttcggcccatttaaggtctagcccacgaatttaatattttagataggtcggataagtcatgtctgcaaaataaatgaactttttttccaagatccatatacggaccgcaaaagtccacatataaatagattggtttatagaaaatgttttaaaaaagtgaaaatgtatattattaatagaaaaaactgacttcattttttaagttaaaatctatcacaataaaacttaccaatattttaacaataacaaattaacaataacaacttaaattaaaaattgaaatcttaaaataacaaattaacaatacttacacattggacttaagcgggttaaatggtagtccaagagtttgcagataaagcctgcaaggtccacgagcttaatgattgagctcaatataattgtacggatttttaaaaaataggtctgttatccgcttgatccacatgcttaatagaaacacacaaaaatcttcaaacacaacttgcccaaataatctaagttgggctttgcaactttgagaatactgttcataaggatgaatgtaatttcagtttcagaataaaataagttgtttagtacaacaaaataagatgaaaatctaaaatctgcacaatgaaatattttttaaatctgtttaccttcctaactacgatacaatattgtgcacttcaaacaccactaatatgatgccataaaaatggcagtaagtagaaaaatgtcaattgaagctatattttcttttaaagatcaaaaaatgtaaaaaatttaatatgtaggaaagagtattttgaattctcaattgaagcattgatagtgattattgagttttggttaatacttgccaactttaggatgtgtttgtataaacattaggttgaacggacacattccaatacacgttttgtgagaagtggaaattttgacattttggttcaacgttcgtttgggggcctcccaacgaaaaaaaaaatgcacttatataagtcgttgatgttttaggacaccaagaggtcacaaaaaaaaaagaaaaagaaaagaaatctgacacaaacatagggaatgaaatagatgagatatccaaaatttatttgactgtttgaatgaataaaatgctaaaattttgtgtgtgtgtatatatatatatatatatatatatatatatatatatatatatatatatatattttgttagagttttaagtgcacaatcaaactgaaaattaacgtggaagcagaaattaaagaaaaagaaaatacacacagatttacttgattcaataactaggataaaatccttgttacctatatctaagagtaaagaacctgtagacccattttattatcactatagtaacagaacctctctacagcaatgttcaacaggctacacaaaagatctctcaacaataaccaataggactcaacatcacagataatacacaatgaagattacaagaaaacaagaacagctttcttacacaagtgttaaaaccatacaacactaaaccttcattaagttcctcttctcagtttcttgcaagaacccgcattaaaaacaacatgcaacccaagcacaagagataaccttacctgcaatacataccaaaacaggtacaagaatacatggacagagacctatacacacttcatctacttcgttctactcacagggctcaagataccaaccaacaaacaaaaccctagcaaagaagatgaacagagagaaggatggaatcatcgagaacaagagagagaaaatagaaaaaataataggctgaaaaattgaggcacacatgttgctgctgctcactcaaacttagtgaaataaaagtagcttatatactctaggctaaaagctaaagtgcaccgtttcacttaaagagtaacaacacaatggcttttgggcttcacatgtacaggcccaacaaactccaccttgaagcacaagaagacatagcacaaataaaaaacactagggactacaagttcaaagccagaccaaacaacactaagacactaggacgcagaaaacagaacaaacatatacaaagaaagcagattagaacctacaaaacaagagattgcattagaatttctaatttaacaattaaaacagaaataacatagataagagaaagaaatcactgttgttggacttttaacaattccaagacatccttgaatttgctaataggaacaactttagttaaaatatctgctagattgcacacagtagatattttctccaccttcaccttatcacctgcaataacatctctaataaaatgtagtctgacatcaatatgtttagttctttcatgataagcattattcttagacaaatgaatagcactttgataatcacatatgatctgtggaattccatctcctaaaccaagtttagaaagtattcctttcaaccatagtgcctcttttacagattttgacaaggccatatactcagcttcagtagcagacagagctactacattctgaagatttgacttccagctaacaacatttccaccaatagtgaaaacaataccagataaagatcttcttttgtctaaatctacagcatacaataacctttcatagaaaattcattagattcatttctaataaaattcaaacaaaaattagaagtgctattaagatatctaagaatccatttcacaacattccagtgatcttttgaaggattactcatgaatctactctcaacactaacagcatatgcaatatcaagtctagtactaatcattgcatacattaggcttccaactgcattacaatatgacacatttttcatataggcagattcatcttcatctaaatcaccacatacaaatttcaaatgaaaatgagcagctaatggcaagctaacagatttatagagatgcatagaaaagaacttaacaaccttcttaacatacacaacttgtgataaagataaggttctttcttttctatttctaactatatccatacttaagattctcttagcaggaccaagaattttcatatcaaatttccttcagcaacatctctttcagtttattaatacactcaatatcatgagaagcaattagcatgtcatccacatagatcaacaaatatatgtatttattttcattgtctttcttacaatagacacggtgatcatatttacatccaataaatccatgtgaaagaacaaagtcatcaaaccttttgtaccactgcctgggtgactgttttaatccatacaaggaccttttcagcaagcaaactttgttctcagaacctttctgtatgaagctttctggttgctccatatagatttgttcatctaaaattccatgcaaaaagcagttgtaacatcaagttgttctaattctaaatcaagaatagcaacaacagataaaataagcctaatagaagtatgttttaccacaggagagaaaatttcattataatctactccttctacttgtgagtagcctttgactaccaacctggccttctccaatcctgggacttcaggcttcagcttgaagacccacttgcatccaatgatccttttatccttgggtctgtccacaagaacccaggtcagattcttctttaactaagagatctcttcctccattgctctcagccatctctcttgagatttcatgctcattgcctctttgtaagttgttggttcttcttgttcaaccatttcagcaacctgcaaagcaaaagcaacaatgtcatcataagaaaatctgttaggaggcctaataatcctcccaactctatctctagtcagaagatgatcattgaggttggagtcctcttgattttcttcactagattgttgatcaagtgcgtcaacttgatcttcagattcatcatgattctgaaccagttcagaataaaaaacagtggtgttctccacctccagttggacatttccaggttcttgaacctgtctagagtcctgcacaacatctttaaaaaatgccagttcatcgaatacaacatttctactgacaacacatttatttttatatattaaccagagtttataacattttgtccctgtaggataatctacaaagacaaatttaagagctctaggagctaacttatcctgtttagtatgaacataagctaaacagccaaaaggtttcatataactcagattaggaggcttaccataccacatttccatgggagttttgaaattaatagcataaaaaagtgacatgtttataacatgacggacagtagaaacaacttctgcccaaaaagattttctaacaccagaattagcaagcatgcatctaactttatttaaaatagttctattcatcctttcagcaatgccattttgctgaggtgtttcagcacaagttctatgtcttagaataccacattgtttgcaaaaatcattaaattggttattacagaattccaatccattatcagttcttaatgctttaaccttctttcctgtcttagtttccacttggactttccagtctttaaaacagtcaaaagcttgatctttttattttaaaaaataagtccacacacgtttggaatgagaatcaatcatagaaagaaattaatgacagccataaagtgaactatgaatgttaggtgacccccacaaatcaagagtgtatataattcaagatatttttagtttcattctttcctatttgaaactttaatctgtgagattttcccaaaacacaagtttcacagaaatcaataggagaaaatgttttaaaacttaaaataccttgtttatataactcttgcaatccttgattactaatgtgtcctagtcttttatgccaaagagaagtctcaccaggcttcctactaacactacaagacttaggtcctaaagcttctccatctagaaaatagagaccattatctaacatccctttcataagaactatggatcctttaaccacttctagagttccttgaaaactcctaaaattgtatccattcttatctaacattcctagagatatcaggtttctcctaagattagggacccatctcacatccttgagaaccttaacagtcccatctcccatcctaaacctaacagctccaattccttctacttgacaggtttggttatttcccttcatcacctttccaccattaacagacctaaaacaaattaaccagtccttttcatgtgtcatatggtaggtactaccaaaatccatcacccactccctctcacaggaagcattagacacagctaggacttcactatcctcaaaaccactagtcagattagcatactatgtcctattcccattattttgactttttcctttttctggacaatttctcctaatgtgtccatccttatgacacaaccaacaagtcacctttcccttaacaggtgacttatacttattttcagtattattctttcctttttcttttcttgaaactgactctttttactaaacttctttttaataaacagtccctctgcattgactctgttattcactacctgtaaagaatatgaatatctcacacttaaccaagggggggtgaattggttaaaccttggtaaattaaaaattttatgaatcaaaatcagagttcctaggatctttatcacttttcaaaaccaagaaaccttattcaatcaagtagctcagccccaaagaattcaatgaatcaaaactgactttgttgatcaaacaaaataatcaagaacacaatgaataataagagttaagggatagaaaagcaaaacacaatcagatttatactggttcacttcaacactagaagctacatccagttttcttccaaccaacactaggttagagttccactattataattttcagttcttacaaacaaatacaaagtctccctttatccaccctagataaagaacagaaatctaaaaccctattagattccaagagacaagaacctgagaacactactaagttcttccacctagagaaccgcttctctagttccaagcaagaacccaattacaatagccaaatcacaaagaaaatacaaaaacaaaaaaatacacccagattaaggagagaaacaacctgatgatccaatgatgcaatgcacaaagaagttaccagaacaggttgaatgatttacaaatcaaaaagcacaactttccttaatcttgaaatggtttcaagctccaagaatgagtcacacactcatgatcaaagcacaaaggagcaagaaccaattaaacctttagaaaacacttaagaatgctcacaagactgttttagctcagaaaatacgaatgggtaatattccacaatgttagaaaagcaactgagctttggttctatttataatagacttttgtaactgtcagtaatcgattaaacgctccatataatcgattattttgctcatgtaatcgattaaatcaagattgtaatcgattaaaccgtttataagcattttaggattttctcaacgagccaaataatcgattattccgtcttataatcgattaagacaggaagcttcaaaatatcaaaatgtactatgtaatcgattacgaactctggtaatcgattaaaacaggagcttgtagcattccatatatacagtgtaatcgattacgaaatgtggtaatcgattatcttatacaaacttaaggattacaaacatatagtgtaatcaattactagatacggtaatcgattaaagtagggacatgactttttcaaaataagtctgtgtaatcgattacgatatattggtagtcgattatcccagaacgtcttaaaatcatgtatagctatgtaattgattactacccattaataatagattaaagtgttcaacaaggcagtttatatgaaaataaaggtcaaataattgattattctgataggtaattaattacattgttcttgaaagcttttctagaatagactaagaacaaaataattgattatacctttaaggtaatcgattacaacagtacaaaaaccatttttccaaaaacctttgaatcaaattaaaaacttagttaattaactaaagccttgtaatttttatgagtccaaataattgaattattgattaatatgaatgcaatgcacttggatcaccagaattgcttttctcttacacatttcacagaaattaatcttcaaggcatccattgcatgttaaaagctcaaaaccaatgcttgattcctttacattctttaagtagctccccctgaatccaacactaccatatcttgttctttagactttaaggctcctattacatcttctaatgacaaagactctcttccatacttaatagcagatttcacatccttgtaagaaccaggcaaagcattaagaagaataatagcttggttttcatcagtaatcttttcatcaatattagcaagactaatagttattctcttaaactcatccaaattatcatccaaagatttactagattccattctgaaaccaaacaacttttcttttatatgtattttgtttgagagagatttagtcatatacatagattccagttttaaccaaataccagcagcaatagtttcatcattaacttgtctacgaacattatcactcaaatgcagaattaacagattataggcagtttcaagaatatcatttttattagtttcagataaagatgagggtaagtctttctcaccaccaagtgctttagagcaattttgatgtaccagaataaccctcatctttttgctccgcatgttgaagtctcatttcctgtcaaacctctctacccccactctggctgaacccattctcgagtgtccaagggtttgaagttgacctaagcaccaaagcctgaaatacacaaagaagacaggaacacaagaaccaaccaaagctcttgataccacttgttagagttttaagggcacaatcaaactgaaaattaacgcggaaacagaaaataaagagaaagaaaatacacacaaatttacttggttcagtaactaagataaaatccctgttagctgcatccaagggcaaagaacctgtagaccccttttattatcactacagtaacataacctctctacaacaatgttcaacaggctacacaaaagatctctcaacaataaccaataagactcaacatcatagataatacacaatgaagattattagaaaacaagaacaactttcttacacaagtgttaaaaccatacaccactaaacctttattaagttcctcttctcaatttcttgcaagaacccgcatcaaaaacaacatgcaacccaagcacaagagagaaccttacctgtaatacataccaaaacaggtacaagcatacatggacagagacctatacacacttcatctacttcgttctactcatagggctcaagataccagccaacaaacaaaaccctagcagagaagaagatgaatagagagaaggatggaagcgtcgagaacaagagagagaaaacaaaaaataataggctgaaaaattaaggcacacacgttgttgctgctcactcaaacttagtgaaataaaagtagcttatatactctaggctaaaagctaaagtgtaccgtttcacttaaagagtaacaacacaatggcttttgggcttcaagtgtacaggcccaacatatatatatatatatgtgtgtgtgtgtgtgtgtgtgtgtgtatgtgtgtgtgagtagagagaagaaaggaaaaggaatgtgagctatgtttggccagtcctctcctgtttctttctcacatcgcttctctaactctggatgacaatcgaaaatagtcaattgttgcagacacgtaaatctaaggctcaatggaagacacatcaacttggaacagtaaaaaataatgaattcacaaagcaagggaaggtttccaaagcaacgttctagctttggaagattctttaatcttaataccttgaggaagtcatatcatgtaaagcctgcaactctgccaactctttgcaattgaaaatccacaatttcaaaaggcattgaaaacgtgttgatacattgaatttactacaattgaatactgagagagagtccaaccctttcaacaatacttcatccccaaaaattcaggacattcaacaattccaagcatggaaaggtgtgggaacatgtttttctcgtcatcccttgataacctttaaattttggcagatgacagatgatcagaacttctagggccctaaaaactactcgcctatcacaggactctcgtagaggtgttctacattattcatgtctaatgttagaatctttagagaaggtagtttccccagttatggaagttgtatacagtttttgcaattcaataactttaaaatggttaaatatttgagataaggactagacatccattgtgggaaatgggcacctttatatccttccacgtctaatctccaaagttgtttggtatcaggttgaagcgcttcaagaatcttctcaacattgtaattcgaagtcttcatttcttccccatgataaccataacttattcaattgcttacttgacaataggcttcttgggcatccattacactttttacatttcctagatgcttgatgtcaagatcttctttctttaagcttcagaggacccaattcttccaaacggaatcctctttctttgccaagaaagaacttagttaaaatcattagggaagtaaacatccctataataggaggcaagcttgatattcttggcaatcattaaaagatagttgtcgtagagtgttgtgcgatttatgcgaatgtatatacggcaagtgcaccgatcgttaacaagtaataaaagtgagtaagtgagttatcgtctccacagggattggggtaatttttacaataatattaattataaatgattggaaaataaagacagaaaataaagaacaaagagttgttagataaatttgtgtttgaataagaatagaaattaaaataaatgcagtaaaaatataaaagaagttaccaatggaagaaacaattgtggtcagacacaatcctctttgttcctacctccttcacttgattggtttattatcttaagtcacacacgtgataaatctttcctaaattcgtaaatcctagaactactagagtcatgaccagcgatttaaccctttaattcgatcgagaagcctaaacccttagtgaatctgtcaaactaagtattcaaagaatatatctcatgtgatcttgttaagattattcggaaaataagtcttttctaaattagttaatccctaatgtcttagtgaatcaaccctttaacctaattcaaaaacccaatttcttggtgaattctattaagttaagcatgaaaaagaacatattataaaatccgtagccacgcatccctatgtctaggcgaagagcaactattattctaaacaggtcagaaattagaaccccaacgtgtccattgcgaattctaaccctcaatacttaaatagaatggccaattccaaataagaataaaacattaaatagcacagagtagaataaaataattaaaacagcattagaatcaataccaattcaagttacagaggaattacatcagttcatggccttcccacaatacaagttcagtctgccataggcttcaagaaaccaaaggcttagagaaaagaaaggaagagtagagaggtgttagtgtgtaagtgtcagtgtgtgtgttgaacccccccagaggcctttatttatagatagatctaattaaggtaacaaggcctattttctgttccaaatctaaatcaaatcttcttaattaaggaaactaaatatatttatagaatcacttaattaaggcaactaatcctaatataataccaaatcttgaaatatatgatttaaataaggaaactgtttcaacctcacgcgacccgcgcgcgataccacgcgagtcgcgtggattggcagtaaggaatgacgcgtgtcgcgtgaattgtgaagtgcctcgcgtgaagggacagaacagaattgcttattgctttgagtactgacgcgacccgcgtggattaccaagtgtgtcgcgtgaacaagcagagctgaaatggcttaaacctggaagtttccacgcgactcacgtgatgctccaaatcttgttttcttctttctttggcctttattctccttttttgtcctgaaattgcataattgatattgaaataagataaaataaaataatattaataaactaaccaaaactaaactaaatcctaattatttaatcaaaacataagctaaaactattctaaaaataagatgtgtttgcaacacatcatagagcttttaagaatatcaaattggcggggaatattttgagatgattgcaacaatctaatttcaatatttgcaaattccacagtttaaatagtaattctggcaaagtttcgaagccaccccgagaaggattcaagtaccttagatgttttaaaagacctatcgaccatggcaaaatttctttttttacaaaattaatcacccacaaaaaatgacacttcaacacatcatcatgaggagaatgttggtcaccatagtgctctggcaatatataggtcctcaaagatttgacaagatgcaactgcactggatcaatggattcctcatgcacattatgcattgacctataatctaagagattgagtactcttctaggcaaaatagttacatgattgtcttctataatgcaacaaacatcttctgcaacagattgggcaagatcatgaacaagatcatgcatcttgaaacttgtaactttgccaaatttgtttatcacaatatcttgaaaaagtgatctcccatataatttattccacacatcatcaccaacatcttcaacggtaatctttcagtagatgaaattaatccattagccatccaaagttcaattaaatattgcttccctttgatttcatctttgtgaaatactgtgcaataagcaaaacattgtttgtgctcaattggtaagttcaagtaacttaatcttaggacatgaattatggagttttcattgtgtggtaactccaaaagtttgttttccttaacattaagtcactcatttttgtttcttttgaagtgtaacagaccatacctaatgcttttgcaacaagacgtactccttgacacttctgcattatctccttccctatgtcctcaagctctacatgttcatccttattcgatccaaaagcttggtgtttaaacaatttccaacatgacaaaccggtaatgtatgaggaggaattggtcccaaggttgttgcaaccttggattgacgagtaatgactaaaatggaagctcgcttagctccacaagcaaatacagatttcaacctctcccaattctctttcttgtcatcccacgcgtcatctaaaacgagcaaatatctttttctttgaagcatatccctaagttttctttgttgtgaccctagatccagatccttgtaggcacacccagatgctgcattgatgatagatttcgtcattctctccaaactgaaatcttctgaaacacattctcaaattcttaactcaaagtggttgactacccgctcttgattgaagatgaattgggcaagtgttgtttttccaagtccacctagaccagttattggatagacggataaatcctcaaaatcagaagcatcaccaatcaaaaactctaaaattttatccttatctttttctctttcatagacttttggttcagtaatgagagaggtagtttggcgtcacccaaggactccacttcttctctcacgaaccacctcagtcaaatgaaacttagtcctttcatcagcaatttccattatctctcacatattcttttcattttcttggcaattttgtaacggaaaacaacacgcttgggatgaaaagatgataagcaagagcattgtaccttgtctaatggaccacacttgaccccttggtactccaaccccagtccttcataggcacacttgtcaatgatgtcatctagtatgtgagctgcatgttttaggttttccagccaatcttttataactctgtttgagaattgtttcacctcagcaacttcaagcgtcaccttgattgtagtgaacaagctggaaagcctttccaagtcttgatcaacaccaagaaatagtagcaactccttttgaacaagtgagatcaaattccatgcaaagtttcgaggacaaactcagccatattgtatctctgcaagattgaaatgcaaaaccgactgtaggaagcaacaaaggaagatgattaacaaagacaagctttgtgtgggcttaagatgtcaaaaagttggctactaatgaagcaatattggaataacttgtaagcaagccaaggtttctcaaaccagtaaggctgggatcacttatgagcaatcttggaattttatagatttggaagcagctgcatacacaaggtatcagggttctcataggcactgacatggcatttaaatgtccaaggggttttgagtactattcttatagatgtggaacttcatgttggtgatgatggttttgatttaccagtcacccaaataaaataaaaaaatggtcaacgtaatttcgtatataaaataaataacacaacgaaaagctaataatatatagattatagaagaaaaatgttgaacgaaaaaaaaattccaagtgttttctcaagtaaaataaatttaaaaaaggtgatctaactatgagctttgtaaatttggtagatacatatactgttttggttttgttaaaatcgcatttggaatataaaagctggattttctacttttacgtatgtgcaaaatgtgattctatgttacaaaaaaaaaatgctattttagatgccttatttttattctttagtggtgcttgctgtagaatgttctccactagcaatggatcattatagtacataatcaattaataacatgtattatgacctagtttgaagtatataccatgatttcttttaaattatacacttttgatttcataggtaggatattcgtatggaaagattgaacatgcttgcaatttccaaagaaaggctcttcagcatgctttactttgtgagttagttcgtttctccttgtcagttgacagttcattttatatattttactgtttatagattgtttataagcatgatcgattaacagtcccagattctttgttgagagagctaagaactttagttttttttttcttttcaaaatggtgtcatttcttaatatacacatgaaaaatatgaacttagatttcaacattattgaatctaaaatatagaaatgttccttaaaacacacccctagctttgggcacatagtaattcaaggaaagaattgtttcatttggcagttccagaagttgaaagaattgtctatagtacatgctcaatcaaccaaattgagaatgaagatactgccaaatatgttcttcctattgccgaatcatatggatttcaattggcaaagcccttccccaagtggcaatgttgtggtcttcctccttctttgtgaattcttatatcattttaatatttgaagatggatttccacagaaggatacaacaactaactaacatttcttgcttgaacagctatggtttgcatattgaaaccatttgctccgatttcatgtctgacattgaggctttgccaaaagataagccaattaaaacgctattttccttagagtttgaattggagatcctacagtgatatccttgtttctaaaccgtgatgttactgtttttttaatagctcatgctccatgacctactattcttccaaaccttttcatatatttttccatgtaaattgaaatgagtatgctccaaccttgcaggttggccaagaacaattctcctttagattggtcttccaggtctggcccttttttgtatatgtttttccttctaattattaaataaaatcataactatttggttcctgctctatttattttaaggtcttatctagccaagtgaattgtgattctgcaaaaaatgttattaagatctgaagaaacataattctttttttagcaccaagtattggcgcctagtaatctttcatttgataataatatttgtctcattatctttttgttggactggatgcttaatgtttctaaaatagtagtatagcagaggtaaaagatttatgataatatgttgtgagtagtgccgttagttggaaggccttgttttacctttttgaaatcataattactgccatgcacatgaccttaattgatttcagcactaaacttatgaaaatatattaattttagcttcaccttgtcagaatcagactcgtaaaaatttcagtactaaacttatcaaatttgcaccgggcaagcaacggtgctcctgagcaggtttcccaaattttgaaagataccgcctggatccttggcacacgttttaaatcaaatcaaaattaagtttaagaagattagaaagttataaataaaatgctaaaaagcaagtggagttatgcgacttaataagaatgcaaataattcttaataatgttacaattgaaaaatgaggtgttaattttaatgaaattagtactttaagcaacttcccaagaagaaaatcttcctaatcaatgaaattaatacaaagataaaactgtagatagaatcgagtttccttgtaaacttttgaatgacatgataaaactgtagatagaatgataaagatacattactccacaccattaattaaacgacaagggtagtgaagaaatttggatacttgacccctacgtgccttgaagtacaacgccaaagacatgaaaacttaatctcttctttgttttagatattcctgacctatggtgtttcctattactgttacatccacaaaaagtgaaaaaaccgatgcaaatctttcagatccttggcagagagcaaggacaagtgcgtccttgtgcattctaccaatggtgtattccaaaactgctcaggttttgatacttcagtgcctgcctcagaagattcacttggactcgaagcagaggaaaatgccacttgccatacattccttaagtttccagccatcccatcagttctgatgagttcttcaaacctccctagctcttgtctacatccaaatccacttgccagagaagcagcttggactgcaaagatgctcaagtttctcttatggaagtttgacgtttgtttctcagtgaacttgatgaaactcttcccctgatgaaatgaaaccactccctccactctgatcttaagcatccaaagattcgtgaattagtgattcccctctttcggttcattgttgttttgaacactgatgtcaagattcaagcaaatacagtgaaatagatttcactccctatagcagtgtgactaccttttacatggatattgaaacaaatcaggcaaaagaaccaaaatggtgtttttttaaaaatatttaacgataagggctatttcacaaatatttacagaaatggggctgcatgacataaactatttacaaaactggggctgtgtaacatgcctggattaggcatgttacaacacgcctatattgggcgtgttgtaacatgcctaatccaggcatgttacagcaaccccaattctataaataagctccccccagttccttcatatattggcttccaatgttctctgcctctgctaaactgttatcattctggtgttttttcatttttttcatagatttttgaaggtgttgtcagtgacgagaaacatgagttcaggtggtaattctgttcgcattgtcttatattggaatggaagaaaatatcaaggccaacaaggtgtgatttttgaagtggaaacacgaggaacctctgtgcgacgtacgtcaaacctgagtgaattgcatgaaaagatacggcaaaaattacgtctgaatatcaaccagtcaatcactttactgactggaagattatggcaacacgagaagttcatggggtttcaaataatggatgatgaagacgtggagttggtactagaagaattttgcaaccagggaaggaaaaattttttggagttgtacgtggatattacagaagaaggccctgttgctttacccatccaggcagttccacatcgtacatcatcatatgctgctggagggccatcgtatgctgctggaggtgcatcgtatgctgttggaggggcaccatttgttggcggagaggtaaatgtgtctcaggaggattcacatgacccgacttgggtcatggatgaggatgaagaggatgacgatgatgaaaatatcgcaatggaagatcggcttcttgaggaggatgctagtgcgtcggatgaggatgaggatgctggtgtacatcaggaagatgttaatgtcgggccatctgaaactcgtcatcatgcggagggtgcttcgagtcaaccagaacaaggtaaattagctaacgatgtgaattagaatgttttgtcatttaatttgttttatattgtttattaatatgctttttaatgtccattaaatgatgttattttgttaggttaaataagtgtatcctgtttaaccgaaagtgtgtagggtttagatggtttggttggggtttagtgcactgtgttgggtttagggtttggttggggtttatgggttgctgttgaggtttagggtttgggtatttgggtgacgggttagggttgtctaattgtttttagctgatatcgttacttaaactgacattcaatgtgtagctgttgaggcgattcctttctggcaaggaattcctcattatacatatattgattggagttacccacccgaacaagactcttttagcggttctggttcgggttcgggttcaggatcagtgtagggtccatggcaactaggggatgatttgtttgtgaaacaagaatttgactcgaaaaaggaagcacaattagcaatgaagcataacttgatgaaggagcatcaagaagcaattgtggttgagagcaagcctgacaagttttccatgaagtgtgttgcgcatactgatggttgcccttggagggttagggttattaaaccagttttccatgagaattgggttgtttcaaaatggggtggaaaacacaattgcttgaatgatcatgtttcacagggtcacagacagcttgatgctgacgtaattgcctcactggttgttggtatgttttaatttactgtgatgcatttcgaagacatttgttttcaaagcatgttgttgatgtgattgttcaatttttttttaggaatgattaaggaggaaccatcagtatcaacctcattggttcaggagaggattaccaacacattcggatttaaagtttcttatcgaaaggcctggtatgcgaagcagaaagcaatgacaatggtttatagggactgggtagaatcttatgcattcttgcccaggtggtgtaactacatgcttcgttttgcaccaggttcttattttgatattcagacgaatgattacttcgttgcaaatcgactggtacgggcaaagcgtgtgttacatcgcattttttggacttttggacaatgttgtgaggcatttaaccattgcaaacccatcattcaagttgatggcactcatttatatggaaagtataaaggaaaattgttggttgccagaactcaggatgggaataatgaatgtgttcctttggcatttgccgttgttgagggggagacgttggaaacttggaattacttcctttctaacattcgctgccacgttactcgcatgcaaaatatatgcctcatttcgaatcgccaccggagcatcatatctgttgttcaaagtcatcctggttggcaaccaccttttgcgcatcatgtgttttgcctgcgccacattgtcagcaattttaatcaaagattcaaggatgcaagactgaagaaggtcctcatgaatttaggtgagtcaaaaccttgaaattgatcatacttttggtttagaaaactttgtaaacagaatcatgttgattttgttttatatgatgttgcaggttatacaccctctacggtcgactttgacattggatttgcacgatttcgtgatagcagtcctgaggttgctgaatggattgattccatccccaaggagaaatggacacgtgcatatgatgtagaggggagaagatacgatcacatgacaacaaatttggctgaatcagttaacagggtgctaaagggagccaggaacatgcctatcacggctcttgtgaaacacacgtacacccgaatggttcagtatttcgtagacagaggtgaggcagccgcggaacagcttcagcattcacaacaatattgcaaaaatgtggttgaagcaatgaggcgtaatcagtcatcggcttcagggcaccatgtatgcagatataacgttgctcgaactttatttcaggtggatgatggccctgacaagtcatattcagtgtcccttgccgatctggtgtgtcagtgtgggaagttcaagacattcaaatacccatatagtcatgccatagctgctgctttacatgtgcgcccaaatccttttcagtacatggaggacgtcttccttgtaagcaagttggtgcaggcatattcagtgccatggcagccagtaggtaatgaacgggccattccaccgggcgaaggtccagtcatcatacctgacagctcgatgctgcgagctaaaggtcgtcccaggtccactagaatacgtaacgagatggacgaagttgaaacatcccagagacgtatgaggtgtggcatttgtaagcaagttgggcacaaccagagagtttgtcctagccgtggggggacttcatgattttctgagtggttgtatgtctttataacgttttaatagtaatcatgtttgattttttggttttctgataatgtatgcatttgatgtaacaatatgttgattacatgaagtcaaagaatgtctgacatcatacgcacaacttggtcgtcgttgaagacgcctaacttgggcatcattcaacacgcccaacttggccgtgactgaacacgcccaacaaatacgcatcattcaattggcccagcttgggcatgactgaacacgcccaagttgggcgccattgagccctatataactcgcatgctcggcactcaaatttcagtgtgcatacgatggcattcttaggagaaaccagcaatcagaacattggtaattccaaattagcattcatttatccgaatggatcaacgaagcacgacgaaacaggagtttctttcctatgtgcaactccaattcctatgcgagttcctgatgactattcgtttcaaaccatgaagagtaggctgcagcaaaccctaattcttcctgaaggccatgttgttgacaacatctactatcgacaattgtctctgcatacaggtcagcactatttctttactgttgtggcactaacaaatgatgatgatgtttgcaaaatgttaaggtgcagtgacaatatgtcgagtgttgggccaattgaaattttatgtgccatccacagaacacccgatgacatacttaacctacttcaatccacaattgttccaacgcatgatgcaatgctatattacaacggaaagtggaacataccccgaagagccagttctgtgggttatgcctttactggaacaaatccaatacgatttcaaattccttctgcatgcaccatggaaagactgaaggttgtcatcaaggaagttgcgccggttggatttccccctgatgggattcacatgtcacagttggtgagaaaattgtttttccgacagccacgccatgcacaatattcgaccaccacaatcgaatatcagataaaagagttgacaagagacgaagacgtgttgaagatcatagcagaatcgaactactagaaacgttttagtcctattgaaattttagccatttttagcaaaccggacatgcagatggaatgagaaatgtgcattgaatatgttgttttacattattgttcttattacaaatgaacgttctgtgtagggtttatcgattcttgtttagtgtttaggcctgatagtgtgattagggttaacgtcttcggttacagacttaggggtaaggctttacataaacttcactaatattgagtaattagttttcccattcaagttttgccttgtcaagcacttccttagctgcaattttctttgcttgtctctgttcactttgcttccttgccacttccttgccaaatgcctatgatgatgacagatacaatcaacctgaataatactaaatcgggttgaggtgtagggtgttacaaacgaatgtacaagcaagcaactaaaactaagacggtgatggccactattgctgtcgctcttgcctatcaggttgcctcggtcttcgaggtcgctgtgaactgcttgcctctacagggtctggcagagacaggcctagctgataaggatctggctgatacatgtctgccttggaaaatcctgtgtcatacaatgggacatacggagctgaacatggagtgccctgctctgcacatactggcatatcatgctcagcaaattggggaacatatggcgcatcggatgcccaactctcatagcctgtagtgctcatatcaaaatacatgagcatctattccacattcgtatgcatccaaccagcgggcacatccccaaagccgacatctgcatcgtatgcgtccgtcggtgtaggcacatccgcaaaatagtatgaggcactatgctcagtaccatcatgatagaacacctgactcccatatgtcaacgacacatctggaggcctaaaagtaccagcagcgacaggcccgagaccaacaatgggctcaggcacctgctgaataggtctccgtcgacgctccagaccacatccctcccttctgctacgaccaacttgaagagacaattgtggctcctcctcaagctgcgtctctggagcttctggtccagactccaccacatgacaactttgtatgaatacaaacattaagcgacccaattcctgatgcgcccaatcaaagtcgaacgtcgccctattctgcctatgtgtggcgaagtatagcatctctatcccatcgacctataaattgaaattcaaatatataaacatcactgtcaattatgataattaatgtaactaaaaaaaatattaatgaaaacgaaacttacactacgacccatcttcgcaccctcctttgtgataaaccgcttcccattttctctgtaccatatcatgtactcatggtttggtgacatttggccctggattggggggggggggaggtcgatgtgttgctccctttgtcgccagcgattcagaaacggcctgagcttacgcacccagttttcttctcgttttccacgaagtgaaaagtcgtgcacacccttcagcttcatggcaggacgtgggattggttgatccctcccaaattgacgcatgcatctatcgggctgggcagcttcaactgtgtggaaacatataataggcgttgatgccatccacaacaatcgatcatggtcagatgcaccaacgaaatggtaatctccatatggttcccagaccacctgcataaaaaaaaaaatttaggttcttttatgttatgacataaaccacaaatgctaacatgcaattactaaactatcactatacatacgtcgtcccgatccagggattcgaaggttgtcctgtagtacaccaactcgtgcgagctaagatgggtagtcggttaaacctgttaacaaaaaaactaacattaaacaatgtatggcttaattgcttcagttgttataaaatgaacatgtagtcacacataccggtggccaaaatgcgctcgtgggtcactaggctgcagaatacatggagcaattggtgggaatctcagccacgcccacgcctgaagcaccatatggcatccaccaatgtcctttctggatgcatctgtacactcgcacatctgtctaaacaaatgtgcaaggaccgcagaggcccagctgtatcctccgatctctgggaaatccccagccaacaaagggatatagcgtgctgccatcacgctacctccagatcgatcgctcagcagccatgaaccaacaaggcgggcaatgtgcgcctttgcaaaccgcgtcacattgacaaaatctttatccaactcaccccaatccccaaaatgcctatcgaagtaagtcagccgtaggtatccaccgatcagctctgtttcgttgtcaggttcttgaccgaaaacgtcctcaatcacctctgcccaatcggagaaagtcactccggtgacgacattgccagccgtgggcaatcccaaaataccagccacatcttgtagcgtgatggtcatctcgccatgtggcatgtggaatgtatgggtctctggcctccatcgctcaaccagagcactaatcagggcagcatcaatctaaaacaatatcatcaatcaattgacaactatagttatggttaaataaaatttgattactagtatgacgtgttccatacctgaatatgtcgcatgcgtgtgacatgaagaaaaccagcgtcccgcagcatatcagaaacgacttgaggaatgtcatcatatgctgatccccccgacgccttgccacgtcgagtctttagtagtcgtactgtgccctcgttccacacagattgtgaaacatgggtgcgctgcgtacgcctacgcagagcgccccatctgtacggggtaggaaccacataatatgtcggatccatcggctcagtctcatgatcggatacagagcgcggtgaatcagatccagataaatcggccatgttatcagtaacttcatacaccaaaaataaaacccatgttaacaattatttaaaattcacaaatcattaaaacaacaaatttctaaacactagaccccattcggcctacaaccataaaccctaatgaccgcaccctgaaccaaaccctaatccatgcaaccagaaccatgacaccaaccctagactcaaccctggactaaacgtcacatacgtggccaaccaaaccctaaaccctaaaccctacaccctataccatacaaggccaaccaaaccataaaccacacaccatggtcacatgaccatgaaacccaacaataccccaaccctaatccaaacgtcaagtaaccatgcccaccaaaccctaaaccattaaccacaaacgaatatcacatcatcaaaccataaacactacctaaccatgcccagcaaaccctaaattttaaattctaatcattttagccaaaagtacagtaccaaacacctaaagaattttctatccacctaaatttatgtcactaacaaattaacatcatcctagcatttttctaataaataaatcttaaagcctaaactaaaacaattatcaagtaacctaacatctattgtgctaaaaaataagtacatgcatcattaacaatataaataaataattaagaacaacatcactaaaaggcagagtagagcgcttacttgttcgcaagattttttctgaacaacttcgaaattcagcagagcttcgctgcacagaatatccaccgaaaactctagagagaaggcagagcacttctagagagatagtggaatgtgaggaaatggtggggggggcttatttatagaattggggttgttataacatgcctaatccaggcatgttacacatccccatttctgtaaacatttgtgaaacagccccttatcggtaaatattttgaaaaaaaaaataccattttggttcttttgccaaacaaatcatttgtcacattttatcttgcaccaaaagcagtcataagtcacattagcttatgatcaatttgtttttttttatagagaataataatcaattatcattgaattagctagctccaaattctattaccagatatgtgttggaggcatatagtatagtaaaacaaaatagatgaatttttcttgtgttgatgcaattaaatatcccaatacttaaaatttcctacccaaatacagcagaagagctattaattgggagagaaatagaagaactttagcaacaaaaagaaagaaaagaaaaaggatttttttttcgggagtcattcatccttagcatacaactatgtaaatctttcagatccccagcggaaagcactcaccaatcactagcatgtccttatgtattctaccaatggtgcatataagattcatttgaactagaagcagaggaaaatgtcacatttgccatagatttccttaagcttgcagttttgggacaactgaaactgagtctagctctttgtcatggagtttcaccccaagaatgtacttgaccgccaattagatctgatagagcaatcccatcccatctagatccaaaatgacttgccagaaatgaaggctgaactgcaaaggtgctcaaatttttgttgtggaagtttgacatttgtttctcactaaacttgacgaatgtaaggacactcatttatgtaccttcatgaggtgttttagtttagaattgatggttagcaggtgaaaatagcagaaataagccgaacagaatgtaccgcgccaacaagcctatgtactaccgggggtacataggctaaatctacaggtggcgccaggagcgccggtgtggcgccaagagcgccgatgtggcgccaagagcgccggtgttgctggaagttggcgccaggagcgccggagtggcgccaggggcgccagatgcactggaagctggcgccatcagcgccaaggtggcgccaagggcgccgcatgtcggtcaggggctctatataaggccaaaaacgcgaaaaagaaggggaaaacagcttcttcttcttccttttgcctccaacctccattaatggatgttccaagctttttgggaccttatatcttagcctaaacacctttctatggcctttaatcttgagagaaacctttgggaagcttgaatccttctttctttttcataaaaacccctttgtgagcaaaatccatttcctcagagaaacctcagagaacttgagattggcgaagacccatggcgtataaagaacgcagaagctcgaggaagctgttctgaggtctttggagtcgccactgaggtaagaaacttcagtttctccggttgattttggatttgagggttttgatgaatagtgacccacttttggtagagctagaattagctctgggtccagttgagagaagtgcttaaaatgatatgaggagcaaggattagctttcagtttgtgatttggagactgttggttttggctctaggtgaggcatgtgtgactgggactgagtcacttgatttgagacatgccagagcctttgtgatgggcttgaggtgcctgataggccatggagacggtgtctaatgagatagaccgtccaagccctgagaaaccctgagagtttgggttgagagagcttggaggctcactgatgttggtttggttgagtctggaatgactctgaggccatggatggatctgagatagaccactgagggtctatggaaaggcttgtagaggataagcctgatgaaccttaggtagatgacctgggtgatgggaaggactgtggttcctttcccagaagcagtggatgactgctagatgagcttgtttatgtttatgtgcctgaatggtctgtaatatgtgattggttgccttgttagggcttgacacgaggtgtcagaggagcagaccatcgctctagaggctggaagtgcaggcacgacttgccaggtaagctcatcgctctggggatttatccctttctcttgtttaccacccaagtgggtgaggtatgcatgtcatgcttgtttctgtatatgcttggggcatgctgtgaaatgaaaggctgggatggcctattttatgattatatgtgaatgtaatgatgaaccctaggatagacactgaacagtgtgagggttatgagacacctgatgtggcaggtgtgaggctgtgtgccttgtgagagaatgcagatcatgagatggtctgtgatggaaccttgaggatactggatgagtatcaggctagttgaggttccctagccagaggtagagtttgaggactccctggaatagctgagattccttgggagatgtcactgctctccaccggaaatcctaaggatggattgtctgtttagaagttcctccttaggcagaaatgatgagattgataaagaccctggttgtggtctgggtttgaagttagatggacactgtgattgtgtttgcattctgaggttctctggcaagtagaatagagtcctatggtgataggacagatggtatatgattgaaagtcctgagggattgagagctccctgtgtggattgtctctctcaggcagtggttgagacccctgagggattgagagctccctgtgtggatagtctctcccaggcagaggaaagtcctgtgggattgagagctcccgatgtggatagtctctcacaggcagtggattggagatcctgggggattgagagctccctgtgtggatagtctctcccaagcagtggaaagtcctgtgggattgagagctccctgagtggattgtctctcacaggcagatggaagtcctgagggatcgagtgcctctgttgtgagataatctctcaggcatgtgttgtgaaagacctggagaggctaggcatgagacagatatgttgtatctctaagagagggcttccctaggggattatagcctaaggcctcttagacgagccatatctggttgtgaaaagccctgaatggtagattcaggcaatatgtgttgtggttaggaggcagtgcctctctgatatgagaagtgtccagtggttgacacttatgattttggtacctctgtgagagatctgtgaaaggtctatgtgacggttgtaatagccagtctgagttgagatgccatggttatggctagactctgtgagactagtctgagatggcttgagagccagtatgaggtgggagtacctctgatgctgagagcattcgttgatgacccagacagctgggattgtgtgaaagctaggcttatgtcctaagctttatgttgtgagctgggatgatgtccttagctctgttatttgtttgtgttgtgcttggtggtgaaccagggtaagggaagatctcccagaaccctgagcttactgagacgtttgtctcaccctgtgtggggtttgtggttttcaggtacttctagaggagagaagttaccacagggcaggaggcccgaactgagtatactggagtgttatgggctgcagatgaagactagaagagtctctttcttttgatctctgtcttgtatttctgtataagtatagggtgtgagtgtacactcgttgtctgtacatatttaattgtataaccacagatgtggtagaacttatgagttgtatatatatgtacagttgatgttatgagtatgagtttatgtttcctcctgatatctctgtttagttttctgagttttgtatctgcctatattctatgtttatgtttagttaacgggatcctcaggggcttgtctataatgatttgtgtgtgtgtttatattccatgcataatgaaatcaagataaacgattctatcgcttccgcactgcgttcagataacgctgatagcgcgctcatgatattattaatgataacacgtccggggtgttacaacgaaaatcttctacagtgaccaaaccaccccctccactctgatcttaagcatcaaaaactctatgaataggtgattccctttcttccagttcattctagttttcaaaactagtgacaagacgtgagcaaacagagcaatataatggaattcactccttatacacattaggggcttccaagggcagtaactttatagtttcctgcagcacaatattcagcagaggtaaaactttgaatctgtagtagtagagaatttataacaagcagtagttcaaggcaaggtaccattttcaattatgttgggtggcatgtctgataggagatttaaccagaggtagcctggaatcatccctatcaattttaacaaagccttggtgaaagaaaaaattgcaagcattgacatgagcaacttgtgaaaatatgaaaacaaccaaagcaaattcagtaatccacagttttttttacttccaattaatgacagtcaattggctgttgttccccacataaggattataggaaatgacacacccaaatttttcttaaaggcaaagaaataacacaaaagtttgttaaaagcataaagacttgaagcttacgctccattgctaaacacagttttaaacaaacagagccatacgcaaaatttagaagagtttaggatatggatattctaatgcagggtaagaatgcatactgtaacacctcgtttttccatcttgtattttatttaattttagtaaaaattcctttctaacttacttaaaaatatagtagttataaattttcgtggaaaattcttttcttcttgcttaaagtattaaccgtcaataggcaaaagaaccaaaagggtgtttttttaaaaaatatttaccgataaggtgcgctttcgaaactatttacaaatccggtgcaggagggcctttatttacaaatctggtgttgtgtaacatgcctgaattaggcatgttacaacacgcctagattgggcgtgttgtaacatgcctaattcaggcatgttacagcagcaccaatttggtaattcaggcccccccgctccgcagttggttcatatattggcttccaatgttctctgtctctgctaaactgccatcattctgatattttttcgttttttaagaaatttttgaagatgttttgagtgacgagaagcatgcgttcaagtgctgattatgttcacgtttgagggattagggtttgctgggcatggttaggttgtgtttaggatacgcgcatgtgacgttagtttgtggtttagggtttagggtttagggtgaccccgccaacaagaagggttgtcatctgactgtgaaatcaaatcacgctatgactcttgcgaaatcaaatcacattatggcaaggattactatgcctgccccatcaacctaaccaacataaatagtaaatcattaaccataaacccttacaccatgtaccaatgtccaccaaaaccataaaccctaaaccataccccctacaatcctggaccgccaatcctaaaccctataccctaaatccaaaccatttaacacaaaccctagccatgtaaaccaacatacacctaacccataaatccacacaccttaaacaccaaaccattaatctcaaccccccaaaccctaaaatcatgagcctcgacgtacattgtttccagtagtgccaagtccatcatcatatacacagagaagaagcaaaacacaataagaaagaaaatgtctgaacatgtctttctctcattcaccttcttcatcagctcatgctcatagtcctcagagtaacccttcaatccccgcaaacaaatgcaacaaataacttgttacaactttaaaggttcatacaatcataacttagcatgataaactaataagcggacactgtatgtttactgtactacaactacgaaggcactattactggttacaggaagatgtagcatgtgataaaagaaggaaagtacacaagcagagcgtgtctttacagatgcagttttttatgtgcctagacaatagacatgtttagggtttagggtttggctagggtttagggattggttggggtttaggggttgggtattcgggtgaggggttagggttgtgtcggcagtcgtacatggtgtttagggtttagggcattgtgttgagtttagggtttggttggggtttagggtttggttgggatgtagggtttggtttacggtttagggtttggctggggtttatggttgggtcggcatacatacatggtgtttagggttagggtatagggtttaggattggtggtccaggattgtagggggtatggtttagggtttatgaggcaaagtgtatatctgtccttttagagcaacataattcttcaataggctttctagaagactgatgaaggtagctgaacaacaaataacaacatcgatcttaccttcaagaccatatgttcaaaagcaactacacatccatgtccatcacaatcttcacgttagactgtatcatgggttcagaggatataaaattttgaaatggcagacttgtaaccaagtttggaagaagaaatgtgatattggctcccacattctttagggtttggctagggtcttgggtttagggtttggttggggtttaggggttgggtattcaggtgagggcttaggattgtgtcggcaggcgtacatggtgtttggggtttaggacgtcattgaacacaccccaccaaccctaaactatgcaaccagaatcatgaaacctaagcctaacccaatcctagcccgaacgtcacgtaccatgcccaccaaaccctaaacccttaaccgcaacccattgtcacataccatccctcaaacgcgaacataatcaccacttgaactcaggcttctcgtccctcaaaacaacttcaaaaatctctgaaaaaaattaaaatacactcgaatggtaggcagtttagcagagacagagaacaccggaagccaagatatgaaggacctgcggagcggggggtcctaatctaccaaaatggtgctgctgcaacataaatgcccaccctatgttggatatggctcatccttcgcagtcagatgacaacccttcttgttggcggggtcagcagaaagccaactggggtcccgctcccaggtgagcgggcgggggtccggggaagccgccccggcgggggtccggggggcagcgcccccaggcccgtagaggctaggtactgttgaagatttccaacaccctaaacccttcaaaaatctattaaaaaacaaaaaaaaaccagaatgatggcagtttagcagagtcaaaaagcacagaaagccaatacgcgaaggaactgggaagggggggtctggtgcactgcaacatgcctggattaggcatgttgcaacacgcctagattgggcgtgttgtaacacgcccaatctaggcgtgttgcaacatgcctaatccaggcatgttgcacagcaccattttggtaaataagcccccccgctgcaccagaattgcaaatagtttcgaaagcgcaccttatcggtaaatattttttaaaaaaacacccttttggttcttttgcctatacttgtagcaaaatattctatttagacattatacttctaaacaattattttcttgaaaataatcataaaacatagggttgtaagtcattttaacttttattcattaggttagattcaagttatctattcaacactaaaatcaaattacttaatcaaataatcattcatatagcaatctttggttctttgagataattcatcaaacacctagtctacaaagcttagtttttcataaaatcaagtaaggattctcatgtaattaatattcaaacttggcttatcataaacttccccatacgtaccttgtttctcctcctaaaagcttaataaacttcctcctaaaagctcctagatcccacgtgaggcttcaaaatgctagggtttttgttctttgaaagtggaagggtgatggaggaggttggggaagctttgggaggattgattcctccattttcgtgctttgggagcttaaataatgttctccgcactgcttccactcgcccaggcgaccaaaatttgcctataccactcgcctggacgagcagcccattttctagaattttctgtcttagtgaaaaattaatttctcacgttccagacattatttagacaatcccaacggtcaaaagttagatatatgagttaagaagctttctctaaaattttaaaaagatccaacggttaaccaatctataatgatgattttactaaaataggttttcaggttaaattcagaatcacttaatttacacacaattcaaacaacctctacataacttgacatctatacatactctacacacctagggatggaaacaaaagttttcttctttttatatcatttgatgcttaagaaagccttattccacttatgactttctgtcacaaactattccaataatctattatctaagagtattctgtatttccatcataaaaatatctattcaaaatatctaagggtgttcttgtcctttccaaaatattcaagggcatttacgtaaatttccattctaaaatacctaagggcagtttggtaattttcaaaatatccaggagcattttcgtcatttcgtcctcaaagacatttctgtcatttctgatttacgaaaagggcaatgtagtcttttctcttcaaacatttccgtaatatttctaattgatatttcatcctaatctttcaaatatagagcatcaaatcttaatatgtacatcaataattatataatgctttggctataattatggaaattaggggtgttacacatacaactggtaggatatgtgcacatagaccaactccctttcaaattaacaaaacacaaaactctgagaataatctaaagcaaaatataaacaacaatgagtaagaacaatgccgattgcccaaattaagcaaacaggaggttggcataacattacagatcatgcagatcctatttttttcttgccagattgtcctctgatttggttagaagagaatctgaagaagagtcaacatggggatgcggatagttggtcaagactttatatggttatgcttgataagttgagggtgcagcgtaacaattttgtttttcataaaaattggttagcagccaatggtgtggtatagcaggttcatttcttaatgaatagtttggatagagcgaaggaatttgcagccagccttgatgattactcttcgtctcatggaagagatcacgagtcttatccaaatggaattaggtggagtccgcctcctgaaggtttgtttaagttgaactgtgatggggctgtgaattgcaactccttaaaggttagtgctggcggagtggtttgtgattcccacagaaactttgtgattggttttactgctactctggatttgtgctcaatcaatatggcagaacttagggcgatcctccacagattaagagtggcccatcagcatgggtttcgtagtattgagttggagtctgattctaatgtggatcttcatcacctgggactgtagtaggcttattggcctaatgcttaacttcttaatgacttctccgctcggtgaggtttattcggctaggaaatgaggtatcagagaaccttatcttacgcccggtacaagatctacaattccgtgagcttgggcttctactgctgacataaaaacatcccaagggatagagttggtttttatagtcacctttcttttgaggatgcccgggaaccactcctaggagtacaacttatactgaattgttgtcctagctctcatccttgccatgcactggtttcagaaattaagaaattgctgtccccctctcctcttatctgaagcattctgctatcttcatacttttccttcgcttcctcctcctttttccctggaagatcagcattacacacatcaatatgtgagcttttggtgttttgcctaacatttttgcataactatgcatcgaataatttaactttgcttcaaagctcatgctacaaaacctctcaagcatctgattgaaatgttgtggactacattttggtgatgcaaataatggcaagagaagattttgacaataaattatgctatcaaggcataatgtgcaaagatgtcttggtttatactgcagcagttcaatttgtgttcaactatgaaaagagtgttaaaaaatgattttattaatgaatttcgcaattgaagcagaatggacatatatatgagattcagtctccatcctgcaaatacaaacaatatgtagaaaaatttataaacgttttaagaataagtggtagactggatatttgtcaagtactcaagtcataatttagaacattgcttaatacttattattttgccaccataaatttgtagaatgctggaacgtctagctggttagaacattaattgtggcatgttctaattaaaataagtggtaatatttgaacttaaacagcatgcatgtaacgcgactctacaatctattcttgagtagacaatctgaattatgattttcattagtgtggaacccactatgattcatattaggtctctaatatgaatcatagcaaacctttcaattatccaaatgccacatcaagcatgtccacaagtaccaaatttccagttttcatcgtttcaaatttggtaatcttgtgcattacattatagtttccatcaggttcacaagaacttaattattcaacatcactcagcaattacaacaagaggcatttatccagcaagaccaagatacaatgaccaaaagacaaagcaattcatctacctgaacagtaacttaccaaatgtcttgcagcatgacgataatagtctcccttgcaacgacagttatgccgaattgccgatcatcaatcacgagaccctcagatcagagtttcattcttttttgttcactgatttcagtccaaccaaaggtctccccaataaacacctcatgtccaatcttcccttcagaaaccaccacacaatcaaggcacacactgtgccaatctgatcgtcaacttgaccttcctcgcttcatttgcatacccaatactccggagaccaacaataaccgcccgccgagttgccctcaatacttgatacccacacttcaaacacgaaatcaaaaccttggacgcacaaaggaaccgcctcgccctgcaaaggttgtgcaccacaatagtataagtaaaagaatccttcacctccatcacctcaaacaacctcaaagcatgatcaatatgcccggccttccccaaaccatcgagcaaacaattaaatgcaaccaaattggatccaaaccccaacgaattcatataattcaaatgcctctgagccccatcaaaattaccagccttacacaatccatcaacaataatagtatgtgtatactgatcacactccaagccttccccctcaatctcatccaacaacctcaaagcatcatcaagcctcccctgcctgcaataaagatttatcaaagtattatacgacacaagatccggcctcacgccagaactcaccatcatctcaataatctcctcggcctcctgcatccggccggtcttgatcatggccgcaatcactgtgcaatacgcgaatccgtcgaaagtaaaccccaaactcctcatctccgacaaaatctccaacccttcctcgaacaaccggcacctgaaacagcacgtcatgacggtggtataagtaaccgcgttcggctcgtagccggtctctccgaactccttcagcactctcctcgcgtctttcagcctcctcgccttgcagagcccgttgataagcgcattgtaggtcaaaacctgaggcacgaaaccatgcctctgcaaattcctgaacaagctcaaagcattccctacgtaaccgttcttgcacaagccattaatcataatgttgtatgtagcggcgtggacctcggcgcgaagcacgatttctttaaaaacgcgattcgcctcgtcgggctttcccaatttaaacaaacagtgcattagaatgttgtggctccacgcgtcggggttgatgcctcgtttgagcatttcatcgaacaggtccagggacttcgagaacagagactttctcaccgcgccggagattagggtattgaacgaaacgacatcaggggggatgccggcgtcgtgcattcgcgcgagaacggagtaagcgacatcgagggtggcgaaacgacagtacgcatcgattagagtgttgtaggtgaccacgtcggggagcacgccgagtcgtatgccgtcgacgattgccgtttcggcattgggaatttgcttcgctttgcagagagaggagacggtaatgttgaggagcttggtggagaggcttggcttgagtggggcccaaaacgacatcgttttggagtctcccttgagtgagagtgtgcgacgacgtgtagtttgagaagtggaaagaaagggtgagtgtcgctgcggtgctgatggggttgaaagtcgaaagatacggaagcatcgttcgggaaatgagaacagaagaagtacaccggaagaaaaagcaaagcagcgatgtgaactttggggaggcaatttttggaagcttgaattgggccggatgaagcaaattactcaatagacctacatatttaccatgtgtactttttcttttcagtatttctatattgtttttaggtttaattacaaattttaccactcaagggtgaattttaccatccaattttcataattttacaaattttactactcaagtttttttccaccaattttatcatcaactttcaatatttcacaaattttaccatccaattttttttatttttgtgtattttatcatcacgttgataacaaaataaagtaaaacgttattttttatacttttgtacattggttgtagttataatcgatgtagaaaagtgactttcttcatcatttgtgattatggtcagtgtaaaaagacacttttgtacattgtttataatcacaatcgatgtcaaaatcattcatctttcgtcaacattgattaaatgcataaaaattgaaaacataggtggtaaaattggtaaaataatgaaagttgattggtaaaatttgcaattgagtcattttttatctatagaaattgaaaaatgaaaatagggatttgttgctcaatcaattgagttagactccctagacatatttttatatttgtattttgggaaattttctttctgaaaaacaatctttgaagagtgtagctttttttcacataaaaagtgtaactatttaacacattctctagactttactttccaaaaacaaaactaaaaacatgatattagcttatagctcgagccatattaagaccatattcctaggagtcattgaaacaattggaactgacaagtatcttggtctaccatttatcattggaaagaaaaaagattcatctttggttttcttacggacggaatacggaagcgcataaatcactggactacaaaatttctcacaaaggctggtaaaaaaattctcataaaatttgtagctcaatccattctttggcttcctactacactacaagatgagattgaaaaactgatgaactctttttggtaggagagtaaaaaccaacctagaaaaggaatagattagttgaattgggagaaactgactatggaaaaaagaatttggtagtatgggattatgtcagctccatgcttttaattcgggtgagcggcaggcagattcaaatctaaaatgcctaatctaaaacaaactaaaatagttgttatataacccatttccaaatgtgaaactcttcgggttgagggttttggattaagcgagttatgggtaagttcgggtgggttcatttggatttgaataaagaagaaaaaaaaaaggaaccgttgagaagaaggaagagatctggccaataataagaatgaagaaggagaacgaaaaaagaaaaaaaaaaagaacaaataccatcgaccataaaggaggaggtaggaggggggttctaaaggaaaaaacaaaaacattataagtggaaaagacaactatggagggctcatcaccacctggtctgatcaacaatgttgttgcttagaacatgcaccaacaacagcaatataatacttatgcttagcggtaactaaaaaaaatggacactcaatacattttgggtttattttcaaagcttagagacataacacatgatttgagttcttcaactttgcctaatttctatcactagcatgtgcccacctagtgttatgcttaaaaagaaaagaacttgcagttgaacatcttcaattttcatggtcacaaaattatgcaaatgacgtgacttaagactacctagtgtttatatattagactctcagttagcgtagcaggcataatttttttaagtctttcaactagtcggacaggtttgggtttcgatgaaaataatttttaagcccggacccgcccatacttaattgtctttatttggtttttacaacgattgaattcaataacccacccgaacccacccaacaactctttttctttcggttttaacgggtgtagtttagttatggggttgttactcacccttaaaatcttgtcatgctagaaaaacaaggttggagattcaggatcaaccatgatactattgtttacaaaatcttcaaatctaaatattttccatcggaaaagtttttgaaagctcaacttggacataacccaagctttatttggcatggtatccactcttcgttagttgtggtaagtcaaggtatgcattgcagaattggtaatggaaattctataaatgtttggaaccaaccatggtcaaatgtgaattgcaactccttcatcacatcacctcccatctcaggttctgaaaatctattagttcacttgatccatttttcaatgctgaaaatgctctcaaaattcaacgtattcctcttttaaatgcataggatggtgacaaattaatttggaagcttagtctaaatgccctttaaaacgtgagaagttcctatcacaaaataatggattcaattatggacattgatcacctcaaagtagccaaaaattgggtgtctatttggaagacaaacgcacgaccaaaaatcacgcattttgtttagagacttctttgtggttgcctcccaacaagagatagattatccaaaaaaggtatcgcttgccccactgattatagtttctgtttgcaccatctagaaaatgaatggaacctctttttcggctgtctcaaagccaaacatatatggcaagcctcaggttggtggtctctcattgaaaagaaggtagatgaagctgaaggttttcacgagttgatatttgggttgttggatcaattaacattgtgcaataaatataaattctcaaccatcctttggtctatttggaagcaaaggaatgataggatttggaacaacactgaaacctttccttctattgatgtttctctaacttatcagcacttctcaaaatggtctaatgcaacatccactgcaaatgtttattaaccacttcttgctcttctctcgaccaaccagaaacatatttggtcacctcctcccacaggttttgtgcaatgtaacctagacccatcaattttcaacaattaaccacttttgggattggtatttgtattcaaggtgagcatggttatttcatccaagtgaagatgtcctcttttaatggcattccaacttcggctcagctagaagtgtgggctatttaccatgcctttcgatggacttcagatctaggctaccaaaatgtgatttttgaaagctttgactacaacacaattgtcgacaatcttgcttttccttctactgacatatctgatctccaagttatttcagcaaaatatagacttgttttgtcaagtttcttaaactctaggggtcatttttgtaagacgtcaagccaattatgttgcttatgttgatttgagggggagttgcttgaagcacaaagaactttgaagtcaagaaagaattgttttggactttcaacatgtccttgaagcattgtaggaaagattgtgatcaaatgtaaaaggaaggaagttttctgatgatccaagccattgcattcatatcattcataaagtttgagaaaaatgacaaggcattgataaattgttttaagtttttgaaaataaactaagtggtttttgaaaaatagcatttcactggtttaatcgattattacaagcaaagaatcgattattttgttcttgatgttttctggaaatttctcaagaacagtttaatcgattacattatccgattaatcgattattttggcttagatcactcataatctgtcttggtgacttttttaatcgattaccaccaagctgtaatcgattacataagtcaaatagaaaataccatatctctgatttaatcgattaccaattattgtaatcgattacgtagttcaaacacatttttcacagtgccgagtttaatcaattaccaattgttgtaatcgattacgtagtacaaacccatttttcatagtgtcgagtttaatcgattacacgtcagaataatcgattaatttgttcgttatagttaccaagaatcattatgaatagtttaatcgattacatgagcgtatgtaatcgattacaagtgtcaaataatcgattacaggagcgcttttaatcgattacagacggttacaaatatcactataaatagaactcatgctcagctgatttcctaacttgagtaattcgtattctgagcattctaaagcattctaaactttcactaagtgatatttctgggttcattgagttcttgcttccacaaaactcatatgggtctttagggaatgagtgaagcaagattttctcttttcaaagcttaaggaaagttatgttctgagtttgttttctgcattcaatctggtgaaatcattcttatgcatatcattctttggatcatcaggtgatttctttccttattctttgaagttgtaaatctcttctgaattttgtctttgtttgtctattgtaaatgggtttcttgcatgatgactagagatagtgtttctctaggggttgctgagtagtgttctcagtggggtttgtctctaagaatctaatagtgttttagatttctgaactttatctagggttgataaagagaggcttgcaattacttgtaagaactgaaatttacaatagtggaactttactctagtgttgaatagaagaaaactggatgtagcttcatagtgtttgaagtgaaccagtataattctttgtgtgttggtctaactctgcatatttgattgtcttttgtgaattcttgttatttacttaattcttgaagcattacatctcttgggttgatctttggataaaggttcttggttacaaaagtgataaagatccaaaaagggaaaaactctaattttgatcaataaattttttaaattaccaagcctaaccaattcacacccccccatcttggttaagtgtgaagtgttcccatattttacagcttattctcttgcaagagcatcaagacttaatacttgcaattatgttttccatcatattgcttcttgtttctgtttttgatttggaatgaagctgcataatcttatttcccctaaaaacattatacaagcttataactatatatattgtgtcagtttgttttaacttatttgttaaaataaatgttcattttaaaaaaataagcatctttctattattctagtgtgtgttgtctaaattgtatctgcttaaaaagaacatatttttgcttattttaagaagtaaatcctatctggttcttaaaaaaatgcttttttgaaaaagcactttttcacaaacttgcccatcattaaagagattatagcttccttcaagagagagagagaataaagctttagaagctagtatgactgtgctacaagtattttattaaataaaaacatgttgtcataagctattaattaaacataaggtttaaatatgtttttgattcatcaaatttgaatcatttttgttttaggtctcccaaatttaaatttgtgacttaattaagtttttaatcttgaacattttcagatttttctataaaataaacacatttccatatgtcaatttttaatctttcaaaaacaattggcaactattagtcctttatttatttttggtcaacatttttggtccctatatttttttgtccattttcaattccaattttagtctattatttattttatatttgagattaattttgagcaataaaaatatagtaagtggaactgtcagagttcatggtcatctctaatagatgataaaaggtggtggagcaaagattattggggctggaacaataggtggaatatccaaaggagcgacgttgactatggatgttgagaagaaagaggtagactcaaagaaggtgacatcatcaaacacaagatctcgtttaagtgtaggggaaaaagcaattatatcttttccggaggcaagaataaccaataaaaacacatttaagggtcttggtagagagttatctttacttggagtaagaccacgaacaaaacaagtgcagccaaagacacgaagaggaacataatagagatcctattgagggtacaaaatggagtatgtaatttggttgttaaggacaaacgaaggtgtgtgattgatcatataacatgttgtaagaagcgcatttccccaacagtggaggagaagagtacgaattgtttcaacaaggtaatagtttcccattcagcaacactatttaatttgttgtggtgtgttggtacatgatgtttgatggaaaattcctcagtgttatcagttcgtaaaattttaatggaagtcccaattgattctaaatttcatgtgagaaactttggaagataaagaaaacaatagaatgatttttcattaaaaaaacctagcacaatgagaaaaatcatcaatagaaaaatggtataatcctaaagagaaacagactttactaagaccccaaataagtgaactaaagtaaaagaacacaatacttttattgacgcgaggcctataagaggaatgagcatgtttacctaactgacacgactcacgttgtaatgacttaagagaagagagactaggaaccaaaaaacacaacttgtctaaactaaggtgaccaatcgtctgtccagtacgtcgatcgtgaacaagaatagaattattaacaaaaggactgagaattttagtgagcgcatgagtttgctaatggaaattaaattgcaaggacaactaggaacgaataaaataaaatgcaaagaaaggttagggagtggacgggtatggccaatgccataactttaatttgagaaccatttgttggggtaatagaaggcaatgagtttgaaaaagacaattgagaaaaaaaggttttggttatcggttatatgatcaaaggcactgaagtcaagtatccaagtgccaagagtataggtttgggattcaaaggctataggattaccaggttgagccacgacaataacaagcaagatatgttgttaggatgctcaaaatcgaaggcaatatgtctatctaaagcataaataatcatatttgcaagtggggcccaaggacttttgttggttgtcccaattaattttttgcataggatcagcgatatgttggtaaaagtcacaacaaaggaagcaaaagtaggatcgaaagaactcatgagaaatgtaggagccaaacaaggaaaaaacatcaaacaaggaaaaacaacacaaatttgtggccaaacaacaccagaacagagccaaacaataccatatgtggcaaaaacaagagctaaaagcaaggccaaagctaggtctctagaggaaggaaggaacaacaaaggggtctttgaaaggtagggttgtcgtagcagtggtcacgcaccaattttagtgtgggcgcgtggattccacgtgtcaggaagtggaggcgtgtggcaatgcgcgaggaggagatcaacggtaaggttgacgacattgggttttcctgatgaagaagcttttggtggtatggtcacaccagcaaaagggtgcattgtggcggcataacaactcgcaacaatcgtaacattgttcacttgacatatgtggctgcgactgaggaaaaaaactttggaaaaggggaagatcaaaacctaatatgataccataatacgtttttgtaattgtgcatgtagatacgacacatatgatcttattcataatagagaaatagaatcaataattgattacatgatcaatcaattgctggttattaggaaatacaatcattgattactatcaaataataaatacaagaaactgtataaatctaacaatgcttatgcctgtaatttattatatatccttaatcattgatagaagaggcatccctaaatttttctactattttttagaacttctgtttgtagatctttcccatgcccaagtttactagcttattaaggaacttatggaagattatcaacttctattagataaattcccattagtacttaatcataatagattagttagccatttgtcgattatatgagttagttagttatgtaagatagtttgaacaaggcatgttgtctagaaataagtacagggattgagagaagaagggatttgatcaatttggaaaggtttggcctcctagagagtggggagaggccaagatctctctaatatcctaggtaatagtctaattcatctcctactttgttactagagagttgtactgtagaattacatatttgtttctttgccctgatccattcctatcaacttcaacttactaacataaaagagataactgcaagtccaaaaaatgattattagtaaaatatgaagtttttcttacaaaatgctcatttcaattgaagtatgttctaatttctaattaacttacactatgcaaaattgaaaatttaataataaacttgaagtatgttctaatttctaattaatcttcaactaccatgctaaatgaaccaagagaaaatatgttaagcactaattatgtaaagtaatattatattatcatcaatcaaaaatcattatgtatgataaatttgttatttttacataattatcttaaaagtcatgccaattgtgatttctaattgatagtgtatgactattaaatctttaattatagtaaagacatgatttgtagttagaaaacatttgtagttgattattacatattataatcattattagggaatattatgtttctatatattgtaaatcaatttcactataaataaaggattatttgtgtgatacaaacacacatttagagaaactcgttctaaaatggtatcatatttttagggttctattttattttttccctcttctctttttttttttctctccatcgcaagcccccttttttgtgtgaacagtaacttactatacactgccaccatgttatcatcatgctagtgtgaccctctgatcaggagtgctcctcttaggtgaacccaacgccactgatcacagccctattctccaccacactccagtgcatgaagttcacgtgcctccaccatctttgtgcatgacattctttcccaacatgtcctcttccgtcgaccttcccgccattcttctccacttccgacgacttgtatttttctcatggcttccgaatccaccacgagttccattgtgacctttaccactactccactgatcccatgtgaaaaactcatcgagattgccaactacaacacttgggtcactgccatcagttgtgcttccaaggccaaggccgcgacgatcacttgacaacaaaatcgttaaatgttccaactgacaaccgagattgttgcaagctaattgacacttctttatgcaacgttctctggttctctcttgcccctaatctccaaacacaatgccagactttaaaacctgttatgatgtgtggaccaaagccaagaaagtttattccagtgatgttcatcacttctacaatgtaccactactgcaaatatggctttttacgacaccgattcgacgacgattgtcacataaccgtctttgtaggccacgcggtggcaattttgcaattatttggacaaaacgaagacggtttagctagaccgtcattgttttactgccttcatagacgtttttttttttttttaaaaaaagccgtcttcttctcgcaaacacaaacacttcatttctctaaaagtcattcattttgaattcttgcattttttttttgtaggttattgtcaagatgaggccactatctttgaacacggacgttggagatcccacagttgagaaggtttccaattattaacagtaataggtagggttggatttgatttatagatagatcccttggtattgcagtttcactgcttgaggggctctttccagtttctagagtttgttgggctcaaaatcgaagcgatttcgatagtggaagagcaattcacgggcgtggtgtagtggtacaacaatggcaagggcttcggcttcatcaaccccaacgacgacagtgaggatctcttcgttcaccagttctccatcaaattcgatgactaccgcgttgaattcgccatagccactggtgacaacgacaagaccaaggctgtcaacgactcccctctccagccccgcgtcaaaggatccaacttcagcgccaggcgaaatggtggaagcgacgccatgtgctaccagtgtgttgattctggccacctcgctagggattgcaataggagtagcaatatcggcagcagtggtagtggttgtttcatttgcgatgggtttagccacctggcgagtgattgcatgtgcggaaaaggcagtagaaaaaacacgtgctttaactgtgggaagccaaggcattttgcgagggaatgtgttgaagcttcagggtgaggtgaagaagggtttctgacgttttgcgaagggagaaaaatggtggaatagtacatattctctccttttgcaccttttaacagttattaacttattattattattattgtaattattattgttattttcaggaagtttatacatattgcaaaaaagattatgtggttttgggttttttgactatggtactgcttcaacagcatattgccttctcttgtttttcttgttacataattgttgagatttatatcttaatttatttgtctgaaatgttattatcaatatgataataaatttagactcaagtctcaagagattatggaatgtggactatggagtgttcctgttttcaatgacgcatggtttgtgattttgtgtgcttgaacttgatcaatgattcttgtgaacattaatttggattgaaacttgcaacaatggaaacaaagattaatgatagcatttggtccaaagaaaaatcccaatcagttggatattcttgaacaaattggggtgcctttggtggagcattatttggtcgcttcacaggttttttttcttctattccctttaactttttcctcttagttttgtcatgttgttgctctaatgctgttcaatttgatgatgttatactttcaaacttggcagacgggttaatgaagttttctttggtcttgttgacaaaataatatttagttgatattaatcatgttattgcatcctgcttcaaaatccctagtcttatattctatgtatgcattacctgaggaacaccggttaatgacttcatgttatgaagttttgatctagctgaagttggaaaatatttgactcattagattatttgacattgttatgatagcttgttgacattattatgattattgttacaaattttggttttggatgaggttgataaactcttaaatatgggattccagaagcaaataacttatattatatctttctttcctaagcttcagagaattggtctaaacccataaattgatttaaacccataaatacacttttcaggttgctgcaaagaagccgacattgaaaaatgtcaccgactatatcatagacgttgtttgtaaaagagttgaaataattactactatggtgtcattcttattcctaaaggtataattgatttcatacctgaggtaactattactttgcacagttttcacaatttttttacctgtgtttccctctgtgcacttggaattatgttttagtgttgttcatgtacaaccagtatgaatacacttctgatggtactcatttgtacttggcattgtgctatatgcagtcccaacatcttattgcagaactaaatgaaattcttgcccatgataatgtggatgagggtgggttatggaagaagaaactcattgatcaattattgaagctttttgactttttagcttaagcaattcaagaacaaaatgttctggatttccctttatttagttgtatttgcatatgcattcatatgaattatacagagcccttttggtatttggtgacccttggtgccattatgcaggttgttttcatgatatgtgtggtttctgccattgatccttatcataggtaaatatatttttctttatcattttaaaacttaaactatagcttcttatattttccagtttcttttagggagttggtgtgcacagtactcgacaatccttctagagagctttaatttatgactagaatgaaggtaatcaatgttacgcgtgactctagttgagattgcaattgcctatggcttgcccctatatctgcagtttggtattatttaatgaactttagatccaaaatcataaatttctctgctcttttttctatacaaagggcaatttgttgttaggtctaaatttagttatattattttttatgatacaaaatttgagaagaataacacaactaaggggacaaaaggtacatgctctgtaatggaaaaggagaaaagaaagaaaaataaataaagaatcaaggatgtagtttctagtctctgttatcattaagggaccctcacttgaagcagtcatgagctaagcactagtgagaggaattgtgtttggattttgaaattctttcggagaggagagaactaggtttcttgaatacttggagtgtacactgttttccatcaataaatatcatttgtgactgttgtcatacaatgacgaataagttgaaaattgacaagtcaccttgctttaaatcttcatctcacacactgatactgtggttataattgttgatggccagttataaacttttattcaaataatatatttaagtgtgttgtttacttttaaggttacaagaagtgtcaatagttgtgatggagagctcaatcctcaagaagagaagacaattgaagcaatagttgatgcaaggtaaatatagctaaatgcatgtaaaaaaatgtttctaataattaaagtggaaaccctctatgccaaaataacacaaggaattgtgcaaagagatagaagtactttgcctaagctagaatacaagtatcattgccttgtatgtttctttttctctttctttttttttttaatatgaatgccataacttgcagtgtccaacaaccatagttccattctttggagatcagttcttttgggtagatacaatatatgagaaagaattgggaccatccctaatcccaatatatcagctcaatgttgagaatttatcaaatgtcgtaagattaatgctccagccagaggtgaaattaaattctattctattcttttttgtttattactttgcttgtcttattttcttgaaaggcaccactaaattgtcagttctgaaatctttaaattccaagataatcataataaaaagtgacaatgaaattattgagcctggaaggtatgctcttctaataacacatgcctacttatcttatgttgaactcattgcatcactactttgtaatgcatatagattctatatcatgctacaaaaccaactcattgcattgcaaacacactgcagaactacaattccttgacaaagtaagtccattggcaatgaatatagaatctaagcctgttctatgaaataattttgttgtgtagagtaattgtttcattgatgttgttgaagttgttctgcgccattcaagttattagttgtaacttcattatttcctaccttattttttctgtggggttgcaaacttcaaatatagtttgtgggggtatcttctcactttgtaagaggctgagagtttttgttgtggatatgttctgtctttgcttagttcaaatatagtttgtttgttagttggtgttgtggatatgttctgtctgcactatcttttgtagccacttgaagaatgtgatccattatatatgcagcttcatgaggagatgcaactaccatttctattttgagaagttgctccatgtattaactattgacaaagctcttcttcaggtacgtgaattttatttcatatgtaaaaccctgaaatttcaataactgcaaatatatgttatatgaattattcttgatgtaaatattagattatgaaaaatttgactggtctatatttgaattaattaggtgaaatttcaatttgagacattacgaaaataactgcaaatatatgttatatgaattattcttgatgtaaatattagattataagaaatttggctggtctatatttgaattaattgggtgaaatatcaattagagacaattacagaaatgtttgaagagaaataaccatattaccctttccttaaatcagaaattacagaaatgcccttaaggtgaaaatgacaaaaatgcccctagatattttagtgagatattttaaggtggaaactacataaatgcccttggatattttgaaaatgacaagaatacccttagatattttggctagatattttatggtagaaatgacaattatgccctaggatgaatgatgaaattaccataatgccctttaggccagaaatgaccaatatccttagagattctgtgagaacctgatgaattacagaatactcttgactagcagaatatcaaaatagtttgtgaccataaactctagcatagaatttttatgaattttataaggtgacgactttgaaacattagtcagaagaattcaagcattgaaaaaaatatggaaaaataatagatagaatctatagaattttctctaaattgtggggtgtccagatttatttaataaaatggtttaataattttgatggtcaaaagtgacataaaccaataagaattaaagatataagtagtcttgtagataagaattgtgtaacactctggatggacgatttgtgaacaattggtattgtaattgaagtcagattctgaagatctttagagttttattatttcatattatctttagggaaaagagttcaaatcaaacttgacttgctataagaaaatgccatgtagaaaaccataattggaattagatttttctttaccataaaaaatgacatatgtacataaaatggcataaaaggaagaaaaatttgtcttccttcccctttagcatgaagttcacatgaaagaagggtgtagatgggggaagaaaattcatgaatgccacttggaaaggcaagctccatgatgaagacaagtggtaggacacttgtatgacatgtgatgaacctagaagatttttcttataaagtaagggaatcatcatgaatttagttaagatctaatggaacaagaggaactaagtaggaaactatgttagaatggaactaaataaaggaaattagttgagaacggcaaaaatgtccttgaatattaaatcatttcttatacactatattaaagggggagggtgtaacgccccatctaaatccggggtcattaacctgccttgattactatcattaacgctaaacatcagagttaagcagttcggaagcataagaataaaaaggacatcatcaaatgtcactaacatagcctttatacatcaaaatatggtgaatatacataacatctgtgtcttatacaaaactgtacatataaaacttcccctcaggatacaaaacaaaaccaaaggcgaatacgaaacattagagccacatgctcatatcatctagtctaaggtgtgcaaatcataactatccctgcataggcttcttgccttgggatctatctgctcctcctgaggaatcacctgcaagaatgtaagtcccacaaacagggtgagatataaaatctcagtaaactcagggcccttgaaggtatttccttcccctggttcacttcaaacatatgcatgaaatagtatattcaatccatcactcatggattcaagcatcagaacatcattctcacaatcatcaaggaatcaagaataggcccaagaataggccacaataaggtgttttggtcaagatatatggctctaggaagcttggggatgtcaacaatggagtctagggcaaaaggaagaagaagaaaccattttcccttcagcttttcgcgttttgggctttaaatagtggccctgcccgacctgtggcgctcttggcgccagcctagcgcccacagcgccagcctccagaaactctggcgccatccgcgccagctgggaaacttggcgtccctggcgctacattacagaacctttggcgcccctagcgccatatcccagaaactctggcaccatgtgaactaccctccccacatccttttcatttcactttcattccttcatttttcaaagcttaagaacaggaaagaaaagaccccacaccttgaagaaatcacgtgtaagctagtgcctttaggaggaagttgtgaagctttataggaagatacaaggtatgtatggggaagttttatggtaaagataatttaagtattacttatgtttgaataagtatgtatgaggaagttttatggtaaagataattaaagtattacttgtgtttgaataagtatgtatgggggaagtttatggtaaagataatttaagtattacttgtgtttgaataagtatgtataggggagtttatgcttaaataaatgttgagtgttgttttgtttaaataaatgttttttagtgttgttttatttaaataaatgtttggatttcaagtgttgttgagtgtttctatggatttctatgaagttcatgtgttgctaagtgttttataaatctctatgaacttcatatgtttctatgaatcgaagtacatggatgatatgttaagtttttgtacatgagtaataagctgagttctatacttgattaatgttgagtttctaagtaaagcacatgagacagtaattgataagtggtgttattttgatattttgcctggcgggggttaatccgtgttattttgatattttgcctggcgggggttaatccgtgttattttgatatttttgcctagcagggactagtctgtgttaatttgatattttgcctggcggaggctagaccgtgttaaaataaaaagagaatcatgcatcatatgatttttgaggatgttgttatgactatctgtacattgtatgtattttgttgtttaaattatgtttatcatgaacttaccctgtattttgtgtctgtggttgacacctgccatgacctcaattttattctggcgagcagatgaacaacagagaaagagattgtcaagaatttttgtttgaagatgtgttatttgaagaatgttatgcttatggatgtattctattgagatagaatgttttagttatttgtatcatgtaaaaaaaaatcgaaatcagtttgtactcttattttacattacatcagtataataaatattaatcagtaatagaaatcttttttaatattagttattagtaaatttgtttggtatttttaagcaaattgaaaagaattttcatcaaaaatcaacaaaatacaatatggtaaattgaggcgttagatcatatgccagcaaatttgattgaataatcactatacagctaagtgacttattgacaatttgttgctgctacttagttattggtaaatcttttctttcctcgttagatttgatcgatcaagaaggaaaatatgccttgctcgaagttactaatattttccttctatttttttatctctccgttgtttttgattatttttttcttcttctcagggtggggaggcaaagactaagttaattgaaaaaccaggcaggtgttctgatcaagtgaatacgaatatctaatctgatatgatgtttttgcttttatatatatatatatatatatatatatatatatatatatatatatatatatatatatatatatatatagttcaagtaattatgaatgttttattatagcattgttatgtaacgtttttatatttttaagtatcttttcaactaacggataataattgtttatacaataagtactatcaaatattgtaatatgtcaaaatatatgcttacttcgttttttcaagagaaaaatatgctttcttcgttattaaattatgattggaaaatgcaatcaaagttctttgacagctttccttttacccactgtttactttattgtgttatttattactccttttaatttagtattagtagtaattacaacatagaatattattattaagttttttttataaaagattgggaattttattatgagttctagaaatatacataaaataaaatatattgtaactcaagaaatatagagttgtctaaaataattattgtttcttatcaacttgtttcaattatttttctaaatttattttatttttatactacatatgttctatagaatctaaattatttgtattcttaattattcgtagaattaaaatatatgatgtacttttgcggggaggggggctgactaactaaatattcttatgaatttttaataagaaattattttataacttaatctctcgtaaaaaaatgtatgagtaataagtataattgaaaaaaattgtaaaataacaaaaatatgaagcttattatatatgatactataacgaagaagaagaagaacaggtaccggtaaataaacattgcacaatggaatattataactatagttgtagtttatcttctaatgtagatataatatttatgtatgcaattggaatatatatatatatatatatatatatatatatatatatatagggatttgagattcacggttccttctagttattttgagttttgacttgaaaaactaataaaaaaaaaagttgatttccataaacatgcatgtagaccataatgcatgtctgttatggtgtagaatgtgaactccttgactatacttgtgatgggaaaaggtggtgttggaaaatcttcaattgtgaactcctatataaatgcccaaatataaaaagttacacaaagtgaaagatatattcataataaataatcaaaagtcaaattctaaagcgtattcacacaagttagtaacaataagtcttaagtcaaataaatttaagcctccaagtggatgatatgataactgtgtcaagggtaaccaatgaagtaaaaaaagtcggaagactcagatctttgaccaatgaagatagggcagagtggtgaacaggtacaacagaaatttattggcaatagttctggactcggtcagtataatactccaatagtcatagaagaaatttacagattttaagttggcatatatactctctggtctgtatccttataagtaataactgatgcactcttgtgattctcaatgcaacaccaagaatttgattcagtagtaaaactggtaaagcttcatatatataccaatatgttcttgtagtttcttccttttccctagtataatactattcattgtcctagtcttttgattttgttgctgcatatgtattgaactgaacctatgcattgtaaatttgtaattggggtgctgtgaaaggttgaaggtgcagcaattttcaggtgatatccatgtgcctacttgtgattagttcctttttgtcgaacattgatattggtataaaacataagtagtttttctttagttggagtttacatttgacaggatcacctgaaggaataaccttggtgttgtattgttgtgctaaagtctcaaacatttatttcatttggttgttaatttgaaggcttttggtatctttcagggtttaaatgatattgtaggagatgagatgggacttggaaagaccattcaggccattgcttttttgtcccagaggatctttaccgtaggtaaattttgtttcttttcctttttttaaccttgataggctcaagtacagtaatggctttctacaaagggttaatgtttgacaaaaatgaacttcttttaatcaaatgtcattaaccatacaaagatatttttcaacatataaattttgtttgtggaatgcataagccagactatagtgtattagatatagcttcaatcataagccttgacttaagcaattgaaagaattaatctgtacagtgtgatttactgactatggattctatattattgcgttatgagaccagcccatcatgtaatcactattaacaaaccagctaaaccgatgctcacaatatctctgaattagtatttgctatcttcacatgtttatggagctgagacaacaatattataaaagactaatgcaactagccaatccaatgcataattattgttgcttaattatccatttttagacagattctttctttttttactataaggttcatcgccagtttgaactgataattgattcttggttctcttttaaactcttaggattgttaactctggtgagttacaacataggatgttataagtggtcaacagtgttttatattttctagcattttgctaacatagtcttggtacaataatatggaagttgtaatggttttaggtgatgtgatgttgtaattccaatagaaagtgttaaatgcttttaatatatgatatggttttaatagtggtatgttatgcattcataggtgtaaaataattttaaaaagttaataaacaaacaaagatgattattaacaaaaaatcgtgttcgtaaatgttgagattttaaaaaaaataaacatacaaatgaagatggttattaagaaaaaatcgtcttcataggttgacatacgatgatggttttatctaaataaccatcttcgtttatatttaataaaaaaattgaaataaaatagaaacaaagatggttattaaggaaaactcgtcattgtatgttgacatacgatgacgatttttcctaataaccgtcttcgtaggtttttaatttaaaaaaattaaattgaaattaaatgcaaacaaagatggttattaaggaaaaaaaaaaccgtcattgtatgtcaacatacgatgacgatttccataataatcatctttgtttgtattttatttaaaaaaattacattgaaattaaatacaaacaaagacgattattaagaaaaaaatcgtcatcgtatactgacatacaatgacggttttctttaataatcgtcttcatttgtattttattttaaaaaaattaaattgaacttaaaaacctacgaagacggttattaaggaaaaccgtcatcgtatatcagcatacgatgacggttttttcttaataaccgtcttcgtaggtttttaatttaaaaaaattaaattgaaattaaatgcaaataaatactgttattaagaaaaatcgtcatcgtatgctgacatacgatgacgatttttcttaataactgtcttcgtttgtattttatttaaaaaaataaataaaaaattagaaacgatgacggttttttaaaccatcgtcgaaagtactccattttcaacaagcgcaacaatgacgattcaacaatcattgtcgtatggcctaaataaccgtcgtcgtaggccttctgtgtagtagtgactcaccaacctaatcaacagtaagttggagaacatggacatgtggacataccttagtaagttgtaacatttaattgcaaaatattccgctcttatgctctttactagtgatgcaaagaccttttacaaacaacgcgatcatttcttcatggtgattgctcttgctagactcacactgaacttgtaggcagtttgtaataagattttattgactcccacgattcttacctatgacttagtttaggagtagttgttgcatctttccattccataagcctttggaccctcttccatgtctatcagggattcctcagcccttctctctcattcctcttattgtgtaggacgtagtgaaggacatggtattcactatcactactgcaagaactaggtcatattgaagcagattgtcgcatcaaagctaaagaactgtcccagtcaattagtgtggcccaaatcaccacttctgcttcaaatactatctctactgttgaatataataagcttctctagctttgagtaaccaacaaactttcatcacctattacctttatggcacagtctagtaatcttgtagcctttgtttctcagtcctcctctgtttgaccttggatcctatattctggtgtctttgaacatatgactgtaaccaatatcttttttcttccttgaatttttcggacaacttgcctactgtaactcttgcaaatggctcttaaattgaggtttgaggcatcaaacaaacacatcctcttccataacttacattaaattttgtcttatttttttctggttgtccttttaatttaatctctattagcgaactcacccgcactcttgatcttttggtcttatttgttaataaatatgttcttgtgcaagatcgacacactggatgagcgattggagcaggacataagtctgaaggattatattagctcacacctccaattgcttgtgtctcatctgcatctccagctttcgcacatcaacgccttaggcacctcgagtctagagaaattgcatttattagttcctagtttttttaatgttaagtcctttcaatacgagtcatgtcagttaggtatacatacttgtaccaattacgatcctcgtgtcaataagtgttttgtgtcaccttttgccttagttcacaacaatatttagggtcctagtagagtctgtttcacattaggatatttttattttgtcacttttattgacaacttttctctttgtacttggatctttctaatgaagcatcattctaatgtttttcctattttttgaagtttttaagctgaaattcaaaatcagctcagcttctcaatcaaaattttacaaactaataatgcaacagaatatttgtcgtctcagttttagtcctttttaaactcaggggattctttgccagacatcatgtgcccatacaccataacaaaatggtgttgctgaacgcaaaaaccgccattattagggaatatggtttgtaattaaaaaatatctgcaactgattattagggatgacaatcattattagggaatattatgtttccatatattgtaaatcaatcacattataaataaaggatcatttgtgtgatacaaacgcatagttacaaaaacccattcaaagaaattaaaagcaatattaccaccttaagacaatactcagggaattttctgtcaggttgtggttgaagtttttgtggccaaattggacaagtttctaaatagatttaccaggagagctttgcagcccccttaaatcatcaaagatcaagtgcatggttttccccttaacaaaaacaccatccccatgagtccaatagaatttcgacacagcttcatttcttgtccatgaatttcccagaggagcaactagcctcagcaacagtactcaagacccaatcaccactgctttgacacttgttgttacacatcaaatacttaatgggctctgtatcatccatcttcagcttcagttagcaaagtgcttcacaagggttgcatggacaaagcaacattctcttgcagatatgtttccagaaaacctcggcaccagagagtaggcaccaatctacatgtaaaaccactaatccactgcccaaaactatcattggtcaatccaacacaaacaatagcaccaatataaggtttacagccaccataagaatcaagtttgacctgacagcctttcaccatcttttaaccttacttgacttttcttcttttctgattttgcagtaaagcttttacatgataagcacttattcaataagcacttaattactctttttactgaaacacaccctacgtcatccttgaattccccttgaggagagattgacctgtcagcacatacattttcatcaccattatttggtgcatggcagtgctccattttttcattcattggctcatatatgagataaatcgtggtcttgttaacaacagttaacctgctcccaaaaacaacaacaatttccactttgttaccaggctctatatttgataataccctttgccactcctcgtcttctaaggaggctaatgcatcactcttgtaaagctgaatggtggtctttgtgtgatttatcaccaacaaatttttcaagccatctgttgctatattgactggggaagaataatggacatggcacatcattgtcttcaagttacgtttgttcacttgagggatttcaaaaatcacagaagaatcttctccatggaaagttaaccaatctggataactatcaccggggagcaaacaaccaccgttctcactagtattcacattctgtaaaaatgaaatctatatgctcaaaagtcttttgaacaataaattactatcaccttacaattagctcaacaattaaagatatagcaaaataataactcattttcccatcaatataaaaacacatcttttgagtattggtaattattctaaatgatgattgcttgtagagaaatagctaatttcaagttatgcatataaatatttggttgcttgggttatttaaacaaaaactataagcagcccaactcaaaaataccataccaatttaaaaaatgaaaaactgagagaacactcatcaatttaatttaaagagaacactctcaatttaatttgaaaattatattgtgataataactgaaaaatttgttaacttacacccacttattttctaggagaaagttaacaagttataactttaaattttttaatagacacccaaggtgtaacttgcttacttactccttttataaaacaagtgagtgtgagtgtatgttagcaagtgtatataggatttgctaacttatatttagttatcttttaaaagaagcaacctagcaaactataaatacaaaatttttaaaatacacctaaggggtaatttataaatttagttcttataaaaacacaagtgagtgtaagttagcaaatcctaataacaaattataccactcattaagatatgcaatttgaagattattttagttaaatgataaaacaaattatatacaaatcatgttagtaggactacatttaactcgtgtaaaattttcggatttatggatttcttgttctttccggaaggatgaatagactaatactaatctcctaaggagttaatatagtagtatacctatttcaagaatgttctattggtgcaaattatcatcatttgtacatttttatggaaaaaatagtaaatcctacgttatacttctagttatatatgtagcctagtaatatgaacgagaaagaggtctatgttatcaatttgataagaaaaggtttctatagaattatttggaaattaaagtaatgattatggaatacatttttaattactaaatcataacttttgattctttaatatatattactaaccaagagtttctttctatgagttctttttgttgatcatcatcacgtatccacccaattaagtaaaaaataattcttatgcatataattaagcggagccaataattagtagcaaaatgcatgattatagtgtgaaaagcatctatgttggtgtgtatgaccgttttaaagtaaggtggttaagatctcatttttatattttttaatattttatactgacaggatatatacatttcacatatagtttatatattaaaaataacaaaaatgattattggacactcatgacacctatgagaggaagaaaaatgagaaaaatataggtatgataggtgataagatgtaataggaagagatacagataaatgatgtattaattgcgcataaaatagtggggtgtccaatatcataaccataaaaatattcatcttccatgtgtgtgtgggagagaaagagggaaaccataaaattggatacttgaaagagagaaagagagtgaaacctgtaaaatattttgtttaagattatgggcgatttggcaactcattcccatttgaattaaaagagatgtcaacgaatcttttgatcctgaaatgtgaacttgattgctgcattcaattaaagtagaagcattcacatttggtaattgtgatgttgttgcaattgattccaatcctttagaatttgtggcatataaagcatccaaaatgatggttctttcttgagatagttgacgtttagttccacactctacccaaagacttcgaagcttttgaatgtcctcgaaaatagataatagattattggaactattattagccacatgtacagaaataggagatgacatgcctgcgaatgtttgaatgtgggacgagagactactcattggtgacatccaagaccaaataatagaaggaaacacatcacgtgagaatccttcatagccgcacaaagaaatgtatccaatgctttttgatgttactattgaaaagggcactttggttattgcagtgttatctgcaataagggtcgtcaaagactccatttgttccaagtcctcttccaacttgtcaatcttcaaacatccagagagaatgagtgttttaagagatttcaacttgtagatactttttggaaggctacgaaggctaatacaatctttcaaatttatcataagaattttattgagatgtccaacggtatgggagacctcaaacaaccttggacaatctatcagcactagcttttccagattaggcaaattggaaaagtctggggtctgtgttaaattatgagaatgactaagattgagaattttcaatttctccatcaactgcaagaaaataaataccatatataaaaattcgatatactttttaacaaatacatgaaagcaattacggtgtgtcacaaacctttcaagtaaaaaagttaaatatttatattcatgtactatcatttttttactagcaacacaagcctttcaacgtcatccattaaggctacatttgtgtttatatttatcacaaactattaaaagttctttatgagcattcaaagagagtttaaatttgggatgatagatatgttttaaaatttgaattatagcttctttaatccagtagtcaatattgcaattcttacctcctttatttcattacattaaagtttttcacaagaggttttatgtaaatttatagtaaacaaaatagacatgtgcttcatcttttgggttgaaaaagagctttcaaataagataataaacaaataaaattcatttgactagataatctccatgatattgaattttgatttacagttaggggaagtaatttgattagataatcttacatttaaagtgaaacaaacatttttcccatatactaaatttttggaaaaagttggcaataccataagtttaaaagttagaagagcttcctctccaaaagaaaagttagaagagctaatgttccatcataactaataatatacttgatagcttgactacattttgtaaagttttactaaaagtaattgcaatataagagagactaaaaagaaaatcatagatgaaatttatgtctaaaagtaccatgtaatgacataatgttaatatttgagacacttaatttaaaatgcatccataaattagaaaagggaaaacaattcatgaaatgccaaaactaaattaatacctggggctctttccatacaagtttaacattactgttttctaactcgatggaaactagacttccttgatgaaagtttttgggtatgaattttaaaggaaatccatgccaacaaagccatctaagatctttggaaagatattcaaaatctccatcaagttgtacaccagcaagttgaagcaatctgagtttcttcatatccttaaatgcttcagtgctaaaacaatttgaattagttaatggtaacttcaaagccagaccctcaatggttttcgttccctatgacaagaaaaacaaaatggtaaagtatgccagcttaaagatacaaggtaactaaaaatctcacgaaggaatctatcatttgttaatggaagctaggaagcataaaaaaattcacaaacaaactaatttttaaagtttctgtgacaatcattcatacaaatgaatgttaataactaacttgtgtgtattttatttcctttgactttagaaattttaaatccgaaagcaatgaatgaaagtcttacagttttttttgataatacatcaatcacatcctcattaaaccataacctgctacgctcctcaagatcctttggtgattttgcacgaatgatttctcttcccatgtctcgtagcaaatcatgcattccaagtttgttcttatcatcaatagttacaagacttcgctctacaagaacacgtattccattttctgcgaaaagtccacaaccatttaagatacatatagcatcattccgatccattccaataaagaaacaagctatatcaaggaatatgtctctctctgtatcatcacttaaaccatcatagcttatttttaacttcttttgtacttgatcatgaggaattctcttaagtttgtctaatacagccttccattctattatcttcatatcaaacaaatgacaaccaaggactgtaagagctagtggcaaacccccagaatatgcaattacattatttgaaagttcagtaaaaccttctcttggacttgcttgcttgaatgcatgccaactaaaaagctcaatagactcacttttatccattcctttcattatgtacactttgtcaactctatcccctctaagaatatgcttatctctagtagtgatgattattctactccctgaaccaaaccattcgcgacttccacacaaagcactcaattgctccacgtcattcacatcatcaagtacaagaaatacccttttactgcaaagtctttccttcaaagcatgttttcctaattcaacattatgtatctttcttttcgtttctttgtagatatcaaatagaagttgttcttggaaacgaattgcgtcttgcctccaatgttccccaatttgttcaaggaagctccttccctcaaaattgcggccaatcttattgtaaatggcttttgcaatggttgttttaccaatgcctcccattccccacattcctaatagcaaaacatcatttgaatttggtagtttgtggtttaggtctagtagctcaatcatgtcttgtactcgagattctactcccactggattatcgacaaggggcaactctatcttgtctaacaaacgtgtaacattttcaacaatgttttttatagtctcactttcattcctattgggaaaaaacaagatgtcagcatataagcatcaaattaaaatcatagggaaatttgcataaaaaaatcatagttggacaaaagtgtgatactccattagtttcatataatgcatggttcttgctaccatttttcaaaaaaattatataacaaaaaagtattcatgttgaacaattcacaaaacattcttttaaatgaagaatgtgagagtaacaacaagaattaattctacaaaacaaaatcatagtgataccatacaaaagtagaagcaactatttgttgctttaccttcaccgtcaaaaaaacaattgattatttctcacttgaagctaatccaaacaagataaaatgggttttttaaatagttttcataaattacttttaccaaacgtgttttcatttgtttctaaaaaaattttttataaacaagaacaaaggatctcttattcttttgctacttcaagaaacatttatttgatttcctaaaaatattaagtaaagtagaatatcaagccattattgataattgatactggataattcaggggctggctacggccttccaatacaatttatttcatacccaatgatcaatcaagatttaaaccatggatcatttggttagggaacccaacttactaccacttgtgtcaatcgttgttggtctcctcatatatatatatatatatgtgtgtgtgtgtgtatgtgtgtgtgtgtacacatctataaacggatattaattctatatagtacaaagtagtttcagaattaaaaaataattactttatggataaaatcagaataatagatagttccataatgaatataaatcttgatattgaaagtaaaacttacttagatatgatcttgacaggcaaaaagtatgaagattaggaaaatgagctggagaattttgaaagatattaagaagagtttagtttgtatgagtttcaactgctcctccttcattcaatcatctatttataatacaaagatagtatccagagtcttctagattacaaatgaaaagattcagaaaagcaaactaaagtggccgacaaaatttttacagctggtcattacaaacttcagaaggaatctcaaaacaataaacataaataatttacattttctggtataccgacactttctattggttattgagtcttgccgacacttcttattggttatcgagtcttgttgacaccttttattggtcttgagtttattctgataattcttctttgataaagtagtcaagtatatccatatttttctgataaggattcgtgctcgtaccactaccttcatcttttactaattctgccatgatttgacttttctgaaccaagaatagagcctcatcatctattagattttggggaattttattaattttagcccattggactaatttctccttgctaattaaagtaatatcaaatttcttccaccactgcacttttatttgtcttgacaataaatggatgatgtgatgtcatccaatcttgaataggtataagtccaacacataatccagattattccttgtgatgccacaaaggatataaatttatagctgtctatgaaagtagtttgcttcttgaaaaaattgatacatctcttcttctgttggaaggaaaagagctcttgttggattaaagtccaaaaaccatctaatgaaccatttgggaaattttaaagatattccttttttaaactagataaaccaagaatgtttatcaggcttaaattataacactttattccaggcttccatgtaatcaaagtaattatagtttgttggaagaaaggatcttgaaaatgattttgaggtgtacaaaggctgtccccaatcaatgtcagataaaactcttcaaatcttgatttttgagaattgtattattccattgctatgtttattatgcgaaatctcaatggaaccagtatccactaagatgatctcataaaatgttctatttttttgtcatgggtcataggatattgatttcttgaggaaaaatcttgttagctaaatctacatgagatagttttatccaatgtttttctactaccattaatagcataacagtctcttttctaatatagcctggatgtgatttggtatctgtttggaaagtctgtaaagtattggctctctcaaaatctctaggtcctactagaggattaatgtattgaaggggagtatatctgtttgatggagaaatacctctcacaacatgtgataatatatgttgggtctaatgttggggttggttaacattctggatgtactagtattcaccaaaggttgtattgattgtttctctgtattcgtacccagtgggggtccatgttgatcttttgttgtagctttggtactaatattggttttacgactcatgttgaaccttgataaaattctcttgtttaaaaatctggaagaaaattcttatctccttttatatgttatgtatcaaaatcaaaacaagataataaagactgacaactggcaaatatatgtttagaaactagattttttacatctttttgtaaaacagatggagctgttttacaatcagttctaattaaaaacattttattaaataaatcatcttggaatttttctaaacataaaactattgaaagtatttctttcttgatggtagaatatttttgttgagcgagatgccagatactagaatgatatctaacaacctaatcttttgaatcttgggatattatttgtttatggatatctccataacctaaatctgatgcatctattcctactataaaaaaggcttataagtctggtatgcctaaacatggaagtttcttggttatctatttaatttctctcacaacttaagtcatttcttcaatccaaaccggaggggttttcttaagtctattgtataatggtgcacatattattctaatgttgggaataaaattagctatataatcaatacattctaaaattctttgtaattggtttttatcttttatctcatctgagaatttttctgtaaattcaatcaatctttgtatttggataatagcaccttgatatatttcatatcctaaaaatcttatttttgtttccaatatttttatttttctttcagatactactaaaccattttctttcacaattgtaataaatatttctaaatgttctatatgtgttggtttatagtttttgagaaaactaagatatcatctaaataaactattgtgaattttgaatatttataaaatatatcattcataatgttttggtatttacttggtgcattttttaatggcattgcattccatttgtaatgtccaaaaggtactacaaaatctgatttgtatttatcttccttcctcaccgaaatttgataatatcctgatttcatatcaaatttgaagaatattaaagaattatttaatcttttaattaaatcattcttattgggtaatggatacctaatcatccattttaaaactttattaagagatttataattaatgatcaatctagaagcacctctttccacttctgaggctttcatacataaaagtctaaacaactccaaagggattttgctgttcttattaaccctttatcaagatattcattaatttcttttttacaatattctaaatattttttattcatttatatagatctagcttttttcatcatattttttttcattaaaattatcaatataagatagagatatttcatatttctttcaatgccaaaaagctattggatttgtttcacaaaattctttcttaatttttttgtctaactaagatttctttgcttttatatttttattatttaattgttcttttatttttttttaaattgtatttctttatttaacatattaatatgttttatctttgtatctattatacttattgagaattcttttaataaatttaattgtttacttctaggtggttttatgaaaagttacttgttatcctaaaatctcagttattaatcctagtattatttcacatttttattaatacgtaagaagtattataacatattttatttttaaaaatctttgcatttttgataatttatattcgatattcattttagatccatttgcactagatatttttctgttgatttttcataatattttgttggtattaatccttcttgtatgcaatttacatatgtttctgaatctattaatgttatcatattaaatttttcttcttttattactaatgtaatttcacaattccatttatgagtagttattaaacttaataagttaagataagtgttttctgaattatcttttttaacttgttcccattaattttagaagtacctggagtattttcttgagttcttaagatttcttttccttctatttctaatagtctatattataaagctatgttattttgccttaattcttttacttcatattaagaagtttaatttcttcttgtaaatctttaatggttacttgttcttttgcttgtcaaaatctattataaatttctctcatctctataggttttatttattctctatttattttatcttttttcattaaattgttaagttgttgtataaactcttctctaataggagaatcttccaatttttctattatagttatcaaagtagtagtttgttttctagttgacatattaatagttttataatctttacacgtacacatttatgcacctaagcaataattttctttagtaaatctagacaaagaactactagtttcttcttattcttatattttatcatatgttgttttccattttatattagtttttgtaatagggtttatacttatttcttttttattaaaaaaaacaatcaaaaaataatatattaatttcaatttcttccttatgattgtaatattcttctctaaatttttttgttccttctttgctatacgttttaaagtatcactttctatatcctttattatgttctcccataaaatcttgtctaattcaatctttatctatcttaaaaggaactatttctctagttaaattatgtaatatttgtgatcatgttggagaatattgaggggatgcctcaatctcctaatatacaagtatatatatttttggattactattatctaatcatgttagatctaaatctatggtggatcactaacaaaataatttggggttgatttattcttaaagattgtgatctattcattttcaatctaatatctggatcttcttggataatttctcttacttgagtattatatattcttggttctagtattaaatcttttatcatcattttctgaaattttgttaattatttcttcatgtcttaaccttttgggtacttttattgaggattttctaatattggcttctaccaatatggtttcatctttaggagatgatcttaaagctctaaaattataatctatcttagttactttataatatatcctaaaaattatttgtactgctccatatgctacaacttcatctggtatcttaacatataattttataggtttactagttaattcattgcaaaattagaaaaacaattaaaaaaggttgggccatcatgaaggttactctctaatatcgctattattgaatcattaaattgtttaagtctaatgtctcttaataacattaatattgggctatttattcctaatctataattaggtttcgctacgacttgtattaatcctaaatggataaaataatctagtttgatatgttcatctagtatggattgttctaagagaattattattttattgttttcagttccaggatagctatattctaaaacatgtatttcatctcttcatgttgaaaatatactctgttgtttataaacttcactctttcttattgtagctattgatcatgtaatgaaatttctatttctactatttgtaattctcactctttaccagttcctggggttatagaagaaaatgaacccgtagaaataagagatatcagaaaattacatcatcaattaaattactctaatataatgttaaatactatgtcaacacatttaaactaatgaatgtatcgcaaaaagatttaaattcaataaaattaggaagtcaaacagagaataaaatagaagagattagaaaaaatctagaaaatttaagtatagaatttttttttgttaatactctacaagaagatgtagaaataaataagatatagagatatcccaaacttataaattattattcaagaccaccaccggcaaatgttcgacttgaagaatggggtggattagttcaaaatgttttctcaggatctgccatcgcagaatggaatttagatggcatgagtgaacaaattttagatttaacttgtcaaatgccaatggcaacaactgcatataaaacaaaaggaacctcaatacctcatatagaaatgcagttataaccttagtccaagggtttacaagacaattataaggatggtggaataaattgtgtaccgaaagtgatagaactataatattaggtagtgtaaaaacagaaacccaagaagaagatgcaatatctactcttatatactcaataatacaaaattttataggagaccctaatatttttaaagagtaacaaaccaattaactaatctatattgtccaacaatgttatattatagatgatataaagatacttttttttttttttatcaaaagtaaccttaagagaacttgaatttgcaggattttgaaaagaaaaattggtagtaggataaccaaaattatttgttgaagaggttagagaaaatttagtaagatatttccctatgcctataacatttgatggtttaacttatgaacaaatacataatataatcattttcaagatcctttcttccaacatactataattactttgattacatggaagtctcaaataaagttttatactttaaacctcgtaaacattcttggtttatctggtttaaaaaagaaatatctttaaaattccccaaatgattcataagatggattttggactttggtccatcaagagctcttttcccttcatatagaatagatgtatcaatttttcaagaagcagactacttccatatacagctacaaatttatatccttggtggcatcacaaggaataaccttgattatgtgctgaacttatacctattcaagattggatgacatcatagacatccagttattgtcaagacaaataaaagtgaagtggtggaagaaatttgatattgctttaattagcaagggaaaattagtacaatggactaattaataaaattccccaaagtccaatagatgatgaagctgataaagaagcccaattcttggctcaaaaagtcatttatggtagaattagacatggcagcggaacccgaactcatgaatatacacccgaatccatcccgattttaatgagaaaaaaccaagtttatcgggttcgggtctggattttccccgatagccaaaagcggggcggggacgggtatgagattactgatacctgcccccacccccatccccgtcccgcaataaaaaatattaaaaaataaaaataaaaagatattattttgtaatttttttaattaaattaattaattttgttttgtaattttaaaattatgatcccatattttgaatgtgggtttgttattattattttttgttatgtaattagtcttttcgtccaatttttcaataaaaaaaattatatcattttttaattttttttaaattttaatcaaataacaagcgagggcaggacaggacgaggaaaacccaaccccagcgggtatgggaatgggtatgggttttaaaacccgacggggattgggggcgggggcgaagattgggggcaggttttaagtcggagatggggacagggaatgcaataaccgacccaccctgttgtcatgcctaggtagaattagcaataactacctctcaagatgaatttgaagagagactttatatgatgagaagccaagacaaaaagcaataaaaggtgaaggtagtaatacgagcacgaatccttatcagaaaaacaggatatgtgttactactttatcaaagaagaattatcataatatactcaagaccaataaaaattgtcggcaagactcgataactaataagaattgtcgacaagactcaataaccaatagaaagtgtaaatgtaaatgatttatgtttactgttttaagattccttctaaagtttgtaatggacatttgtaaaaagtttgtcaaacactttagtttgcttttctaaatctcatcgtttgtaatccagacgactatggaatttggatactatccttgtattataaatagatgattgaatgaaggaccagccattagttgaaactcctataaactaaacacttcttattatctttcaaaattcttctaacttattttactaatcttcatacttttttatcaagattatatataagttttaatttcacatcatgatttatattcattatgaaactatttattattttgattttatccataaagtaattattttgaattccaaaactactatgtaatatatagaattaatatccgtttatagattagtattttgtcgatcatggctgatcctatatatatatatatattgcacaaatttaatttttggtgtaaccttttgatgattataggtaaaaattaattgttcacaggtatttcagatttaagatacttcgtagccaaatccactaattaattaattataattactactagttaatttcaaatttaagtttatgttttttttataaacgcttgattaccgtaattacttaaactatgccatatatatttcctctttgtttcatttttaaatattttctatttttttaggctaaatatcttcctttgtaagtgttatggtaatttcccttggccaaaaataaaaggctcatttatcttattaattcaaatgcctaatatcttaatcatcaaaggataggaagatatgacaaatattataactacccacttatcagttattcagataaccgaaggtagtggagataacaaccttatagccactaaatccactatcagtcaatctccatatacagataatggatgaggctcactactcaactaactcaggtcagtgttattaaagttataaatagggacgtcctccatggagaaaggtacacacaaacacacacattctagctttctctctttcaattacactgagcacacacccaaccccaatttcgtgtatctcagtgatcatcaaccgtgagatatcagtcaccattgatattctcatagttgcagaattagagtgatcaaatagcaacccaacggtacttttgtactgtacatttgtgttctaggaatcatacagaacagtaagaaatgctttaaagactcaaagctcccgaatctagctcagtttgtatatacaaactaaaaatagtgaaaatgtagaatatttcataaaataaaattctgataaagcagcaagtggtaacttaattacctggaatttagaactacaacccctgagatgccaccagcctcacgcagtaccttcctccaacgacttatgaaaaccctgctcttcatatattccttatcagattcaccctctccgatcgttttctcgtgatcatcttttaaaatcctgttggaaaggttttcaaatgattctccaaagtggccagtttgattgcggacttgagaaggatcaacatcatagaacactggcagaaccacctgccctatggttcctcgacaatacattattttctccaactcttgtagacaccactgcgaatctgcgtaatttgttgagaaaacaacaacagaaatttgagattgttcgattgctagcagcagtgagtctgagatctgatctccccttggaagtgattcgtcatccttaaaaacaatgattccggcattttgaagagccgcatagagatgtgaagtgaaagtagcacgcgtgtcttctcctctgaagctcataaacacttcatactttctgttgttcattgctcctgctggtctcattggtctcggaaaggggacgaagggcaaaaccattttaaccaataaaaggaaaattaattgttgtctcggaaaggtgaagaagggcaaaaccattttaacctataagcattgctaagaatattccgtcaaattaaaaattttaaaatacacggtataaaaacccacctcattgctaatattttaatagttaattatcagttattgttgtgaccaaagtcctggaccaaagaaatgcgcgtttaaaaattaattgttgtgatttttatttataaattatccaaaaataaataaataaaaactacataaacttattatataccattttcaatatcgtaataaaaaggaagaaatgataaagtcctgtcatatgtaaaaaagggataaaaataataaattttaccttaaataaatttttttaaaaagaaatataataaaagggaataaatataaaaataaaattacaagttagattctaacattttaaataatatgtcaaaaaatgttaaaaacttgtttttttagtctaaattatgtttgataaattaaaaacttataagttagtagttgaaaagttaaaaagtaattgaaagtttataagttaatttaatttaaagtatttgataagactaattgataaattaattaataaatattaaatgacataaaaatatttattcaattgtgtgcaaggtttagtttaaaaagaagaagaaaatttcacttttacaaattaaatagataaaataaaatcatgcaatgaaacgaaataggtccacttgatttttcttttatttaaagaaatttaaataaaataaaattaataaataataaaatgtaactttttactatttttataccaaaggaaatttccgtgcactaacaaaggtaaacctagtccacacgctttatacgcgtttttatcgaaatagaaacgacaaaaggcattgggcaggaatgcgccgtttccttcctttattttaagggttaatagtgaaatttacccttgaaattgtaaagtaacgataaattaattttgaaagatcaaaaaataatttttttctctaaatatgaaaaaaaatgataaattaatcatgtgaataatttaataataaattaattcttaaattttataacttaatataaatttggtcctgaaaaatataatttattttcaaattagatttttaatattttaatttaatgacaaaatgatttacaaattttatgataggactaatgttttgtcacacttttgcatatttaagtataaaatttgtatttttcattttttaatgatcaatttcttattgcatcacacttttgaaaataaatttaactatttattattatttttattgtttgtcatttctttatttgtcttttttttatctatttgttttttaggataggtttggttgtgtggaagagaaaaaaatgaaagagaatgagaaaaaggtgtaaaatccatatataattttgaattttttttctttctcttttattttttcacaaccttaaagtacttgttaactattttaatgctaagattgaatttaaagatgaccattgttacaatagatcaccttgataggtggttcattttggaacatgattcctaattgttagattaatcttaatattttaggttatttcataccaaacccttcatcccttcccaccaacctccattttttattgtcagaaatcgtctttaacgacgatgtttcccctgtcacctcttgaaataccaaatattacactagaatggggttaaatctatttggaaatggatgcagtttgcacaattaatgaggtgctataaacaaagtctttgatgtatcttctagagatagggatggtaaagtgggtcagcccacccaaaaacgggccgggctggcccaacccactaaaaaagtgaatcaggctgggctggctcacttttgtaaagtgggctgaaaatactagtccgtcccactttaaagtgggttagtgggtcagtgggtcagcccacttaaaaaaaataaaaaagataaaataattattaaaaaaattcaaaatgtaattatttatactaaaaattaataatgtactaacttaatcttataacaatgatttttaatatataatacatgcctaatagaagtaaaagcaagcatgaaatacatgtctaataatggttttcaattagctcctaagtcttaacaaattcttagaaatttgcttcacaacgatgcagacaatcaaaacatacgtgtagtataactcattattaggttccaaataaaaatatattagggttaaggattcaaaatcattaacttctttttagtcactctccctccaagtcactcatttaattacctattaaatattttattattttttattggtgggctgctgacccggtggactggcccacccctagccgacatttgacccacatttttgtgggtcgggttggcccgtcccgtttaatgaatgtggactcaaagtctcaacccagtccacattttttcgtgggttaatcgggccggcccgccgagccaggcccgttttgccatccctatctagagatgttttttttaaaaacaatttcaataaaatagtgattgtcgtccaatcactttttcacaaatgtttttcatatgtaaacttatgcggccaattgtgtagaaatactttctgttgttcattgcaatctcttggctttcacgggatggaaagagatgaaaggaaaattaattgttgtctcggaaaggtgaagaagggcaaaaccattttaacctagaagcattgctaagaatattccatcaaattaaaaatttaaaaatacaaggtataaaaacacacctcattgctaatattttaatagctaattatcaattattgttgtgaccaaagtcctggaccaaagaaatgcgcgttgaataaaatttattaatttttattcccttcaaatattataatttccaatttaaaataaaacaaaaaaatagatttgtactttgcttgtattaaaaaatcttaactattttaatttatgaaatttacctttttaaaataaaaattaatttctttataaaaacaaataaccgaaccgtaagtttaaaaattattaattaattaacttaatattttatataattctcaacattaccaaaataacaaaacttctcaagcattttaaaatatttttatcaaaattaataaagtttgatacaattggtatataatttgaatgttttaaagtatgttaattataatttaatttccaactttttatataaaaatattaaaatgagtgaaattcacttaagttgttttatatcttaaaattaatatatttttattcattaaaaagatactttaataaaaaatttaatggaaggtagttaaaaaataataacttatcaaaggacaagattttgagaatgtcatcaaatgtgtttctccccctcactatggttaaaattatatgaaaatttagttagaagctaaaaaattaattgataattaaaatttaaaaattaacttatttaatcataagtatttattaaaattatttgttaaaatatataaaaatgtaaaattacttaaatagacatatttatgtaattttttttacaaattttaattttatttttatataaaaatatattttgtattatttataattttagtattaaattaatttaaacacatgtagatttttatttataaattatccaaaaataaataaataaaaactacataataagaatgtatcattttcaatatcataataaaaaggaagaaatagtaaattttacctcaaataaaaaattaaaaaagaaatataataaaaaggaataaatataaaaagaaaattagaaattaaagtgtaacattttaaatagtatgccaaaaaatattaaaaacttgttttttagtctaaattatgtttgataaattaaaaacttataagttagtagttgaaaagttaaaaactaattgaaatttttaaagctaatttaattgaaagtatttcataagactaattgataaattaattaataaatattcaatgatataaaaatatttattcaatcgtgtgtacggtttagtttgaaaagaaaaagaaatttccacttctacaagttaaatagataaaataaaattatgcaatgaaacgaaataggtccacgtgaattttcttttatttaaataaatttaaataaaaaattaaactaataaataataaaatgtaactttttactatttttatacaaagggaatttccgtgcactaacaaaggtcgacccagtccgcacgctttatacgcgttttgttagaaatataaacgacaaaaggtattgggcaggaatgcgcgtttccttcgtttattttaaggttaaatagtgaaatttatccttgaaattgtaaagtaacgataaattaattttgaaagatcaaaaaataattttttttacactaaatatgaaaaaaatgataaattaatcatgtgaataatttaataataaattgattcttaaattttataacttaatataaatttggtcataaaaaatataatttattctcaaattagattttcaatattataatttaatgacaaaatgatctacaaattttatggtggactaattttttgtggcacttttgcatatttaagtatagaatttgtattttttatctttcaaggaccaatttcttattacatcacacttttggatatttttattgtttgtcatttctctatttgtctttctttttttacatactctatttattttataaggtaggtttggggcatttttaaataaataatacaaattaataaaataattagaaaatggtgttgtttgcaaaataattcgaattttggggtcatggaacaggcccaaaataggcatgtttaaaaacacccaatttagcatgtttaaacatgcctatttgaggcgtgtttgggtgggttggtctataaaaggtcaaaacattttacttttgaccatttataatttttcttcattcggtgaaaagtttggcttggttgcttgggagtttgggtagatttttcttgcaatgaagttctgccaacaagtaagtagattttataatttaccatttttttattattgaattattagcgtcgtacattatatgttcttagaaaattactagggtgcacatgttaatggcgtacatgttagatatgtagaaatttgttaggtttgtagaacattttttaggttattaaaatgttaggttcatacatgttagtaagaaaattattaggttcgttcatgttagtgttagctatgtagatggtaggtttgtagatgatggttaggtttaggttttatggtgtagtgctaatgattgttaggtttagggtttatggttaagggtgtagtgtttagggtttagggtttaggacttaaggtttatggttaagggtgtagtgtttagggtttagggggtatgtataatggtttaggatttaggttttagggggtagggggtagggtttagggtttatggtgtatggataatagtttaggggttagggtttagggtttattgtgttgggtttatgggttggggagtatggtgtatggttttggttttatgatttagtgttgatgttggttaggttaatggtttagggtttaggatgttcgattttaggggattatggttaagggttagcgtgttggataatggtttagtgtatatggggttagggtttagggttaatgatttactgttgatgtttgtttaggttaatggtgtagggtttaggctgttcggtttaggggtttagggttaatggttagcgtgtttggataatggtttagggtttatgggtttagggttttgggttaatgatttactattgatgttggttaggttaatggtttagtgtttagggggttcggttgaggggtttagggttagtgtgtttggataatggtttagggtttaggatttagggttaatgatttgatgttgatgttggttaggttaatggtttagggtttagggggttcggtttaggggtttagggttagtgtgtttggataattgattagggtttatgggattagggtttaggattaatgatttgctgttgatgttggttaggttaatggtttagggggttcgatttagggatttagggtttagggttagtgtgtttggataattgattagggtttaggggtttagggttaatgatttgctgttgaaatttactttcagactagacgctaactcaaagcacctcaacatgcttttgatacataagatattttgcagacttagcttttgcaaaaaaagatggtatgatcaataaactatagcatttccacctctaccctgtcacactccaccttgaacatcgagaacaacttcttctctatagcctatctgatgagtccagataggccctgaacaaccatgagaagtaagaagggtgtcgtgggatcaacttgtctcaatcccttagtcataccaaattcttaattgggcttccattcactagtactgacacacattttgattccaagcaacctttaatccactatcgacaaaatcctgacctgttcatcatataaaataaaaattcctaggatattgctttattggataaaacttttgaatgactttcaaaatatatcatataagggagataggtcgtaagtcatcaagcccaagatggatgtccttcttaagtatgtgagtgatgaaacttttgaatgactttcaaaatatatcacataaaacttttgaattctttaagcctttgtgggatctacccaaatagttttagggttaatgtttgactgattatggtttaggattgatagttatgtacattaggtttaattaatttgatatgataattatttgtaatgtgttgtcaaccgaagtcaaattttgtttaactttaattttcatttatttatattaagatagttgttagatagctgactcatcttcgagtgattcttcgcgctctagatccaatcatgaggatgagtccatggatccaacaacacatgtcatccctaccccgtataagtggggtgttctgcgtaggcagactcagcggacccacgtttcacaagttgtgtggaacgagaattcagctcgactgttgaagactcgacgcggtaaagcgacaggggggccacaacatgacgatatacctaacatcgtcggtgatatgttagaacatgtcggctttctacatgtcgcacgcatgcgacatattcaggtatgcaagctggaaattagttgagtaaaccatttttttaagattaatgcatataaattgatttgttatttttttaagatcgatgttgcgttgattagtgctctagttgagcggtggagactagagacccataccttccacatgatgcaaggaggaatgaccatcacgttggaagacgtggctgatattttgggtttgcccaccgagggcaaagtcgtcacaggggtcaccgtcgcgaattgggaaaccgtcattgaggacgttttctgtcatgaacctgatgtagacacggagcttaaagggggataattgcggttgtctttctttgatagactttgcacattggggtgagattcagtcggatttgatcactgtgacacgatttactaaggcgcatattgcacgccttattggatcatgactgctgagcgacaaatcagggggagcatggttgcagctcgttacgtcccattgcttgctgggaacttcgatgacattggatcatatagctggggatctgcggtccttgcacatttgtttagacaaatatgcaagttcacagatccacgcagaagtgacattggtgggtgttacatgctgctttaggcatgggcgtggctcaggttctcccccattgctccagccaatccgcttactactcacccggagtggcatttcggacactggtatgttttagtataactggtttttttaaacaatttgtgtaatgcagtcttatattattctaatggcagttattttaaattaaggtttaactctttaggctggtttcgagcacacgagctgctctggtataggatgagatttggaatctctgagccgggatgaggtacatttagttatttttaagtgttaattactatgctttcatggtccatgtctttatttaattgtgtggttgttgtgtctctgcaggtggttcggcaaccatatctacattaccactttcttggtgcttctgagtaggagcgactattgtggtggcgactactcctgttatatgcttacacaccattgagtattcgcagcctgacagatgcacgcgccaatttgggagggatcaactaattccacgtaggcccaggaagctgaggggtgtgcatgacctttctttgcgtggtaaacgcgaagataattgggtccgtaagctaagaccgtttattagacggtgggaggttcgggaccagcacatcgacctgccccatttggttcagggcttgatgtcaccaaaccatgagtacatggtttggtacagggaaaatgggaagcggcacatatctaagatggctgccaagactggacgtggtgtaaggtttgcttaaatgataatttgtctatttatgtttattatgatagaacacatgattgacactaatgtttatatatcttgatttatatattgatgggctggagatgctgtacttcgcccttagtcattatcaatggtcgggttacagtcgcgagtgggcgcagcaggaagtcagacgtataatctctatattcagagagagttgtcacttggaggaggcagggccacatgcaccagacacccagcttcaggaggagccactagtgtctgttgccattagtcgtcgaagacgggagaggcatgggctaaagcgtagacggcaaccgtgtatcctatttctgagcccattgtagctatcaggtctcgtacttctggttattttaggcctccatatgtagcatcgacatacgacagccaacccatatattatgagtctcatcaatagagtgacatggggtacgggggaaccagttcacagagtcatgcctccatcccccgactcccagcctgtatgtatatgtggctacgacaatggaaatagcatcaatggattatgggccaagtagttctacaggttctagtgagtggactggtgctgacattgacgacatgctctcctagcttgattattttgctgaaggttgtggtggttggccatcagatgtaccgtattccgccctagctgatgagcatctgcaaccctcatattcatagcagggcactccatgtccacctccatacatagacccgtatgtggaaggcttttcctaggcagccccgcctcagccagagcctgctcagcctgaaccgcctcagccagaccctactcaggcaaacccttccccgctacctcgtagacggaagctacctgatcgtctagcgcgtcattatcaatggccaccgccgtcttagttttttcgccatttgtggttttttatttcagtttgtaatacatctaatgtcttaatttacatttgttttgaaatttgtttaatgaataacattgtgaaaaacattacttgatagcataggcaacaatccaatagacgaataacattacttcataacagaagataatgtaatcgacattttaaattacaacgacaattgaacataaccaaacttgataaacactacttaacacattgaatcattaggaactcgcattggttttggagaagggcattcaaaagaaacacctgtttcattgtgtttcactgatccatttggaaaaatgaatgctaatttggagttacaaatgttctgaccgcttggttctcttaagaatgccatactattcatattcaatttcgaattcggaggcatgttgtctgggagtgggagtgtatgccttaaataggggtgagtgacgccttattttggggtgttaagtcacgccctattttgacatcttaagtcacgcccattttgttaggcgtgtccagtcatgccctatttgttgggcgtgttaagtcacgccctatttcacggtgttcagtcacgttgtcttccggcgtgttcagtcacgccgttatggtttggactttcagtctaaggtctagaattagggtaagggtaaagggccagacatattataaatggtacataattagggtttaggttaagtttcattgtttactatattcatgtattaaatcgcttgaaatttttaattgttgtagcacataattagaatttttaattaattaggtttaggttaagtttcattgttcacatttaattgatttggaacatacactaatttgtttttcgtgttggccaagtaaaacctagacaacccaagtcatctaatgggccacagatgacagtaaggcccaagtcacctaaacttgaacatgagaagaggctttccctttgaactaaggactttttctatgtctcagtgcgcctagcactactctgccattacaaaatttctcttttgctaagttgtttgaagattctttttttattatcatgattttgttaatgctagggatatggtgtggtaatccgtgtagctggaatactttacgtagccattgattgagataatgaaagggcagagaaagacttgataccaattgtacaaggcatgccaataaagaaacaccaaacacatcaactgcaaccatcttaattggttctctagagtgctacaacaactaataataattaattatgtaccatttttaatacattaaggttaagttttttataaatcaaatacattaacatcagattaattaaaaaacataatttcaaattcatgaagcaccaccacgagtaggacaattcctccgattatgtccaacctgcatgcaaattccgcatccaacgcgccttggaattgtttccacttcgttcatctcattacgtattctagtggaccttggatgaccctttgcacgcaacatctccttgttaggtatgacgactggaccttcactcgggggaatagcacgttcattaccgattggctaccatggcaatgaataagcttgaactaagttgcttatgaggaagagatcatccacaaactgatcaggattttggtgaacatgtaaattagcagctgcggcgtgactacatgggtatttgaagtccttaaacttgccacaccggcaagaacgctctgcaaggttgactaaatataccctatcccagccatcctctacttgaaataatgtttgctcaacattatatgtgcctacatggtggcctgtagcaagggtctggttatgcctcatagcatcaaccacatttttgcaacgtcgctgtgaatgttgaagctctgaaacagtcgcctgacctttacatacaaaataatgaaccaattgggtgtatgtgtgcttcacaagagcggtgataggcatgtttcttgctcccttgaacaccttattcactgattctgacaagtttgttgtcatatggccatagcttatcccttctacatcatatgcatgtgtccacttttccttagggatgccatcaatccattctgcaacctcaggactggtatcacaaaaccatgcaaacgcggcgtcaaaatcaaccacattaggagtataacatacagaaaaataataacattaacactattttgtttacagatttgtcttagattaatgtatttgaaatacttgttaacattcctaaagtcatgaaggccttcttcaatcttgcactcttgaaactttgtttataattacttgtaatatgacgaaggcaatgtaaaatatgggaacacgtcacacttaaccaagaggggggtgaattggttaagtttggtaattcaaaaaattttcttgaacaaaatcagagtttttcccttttggatctttatcacttttgaaaccaagaacatttattcaatctaatggtcaacccaaggtatgcaatagctcaagaactttgttgataactaaaactcacaatcaagaataacaaaatataaccaatataaagaatataaacaacacacaatgatttatactggttcacttcaaacaatatgaagctacatccagttttcttccactcaacactagaatggagttccactattgcaaatttcagttcttacaagtaattacaaagtctctctttatcaacactagataaagttcaaaaatctaaaacactattagattcttagagacaacccactgagaacactactcagcaaattccctagagaaactctatctctagattaagaaacccatttacaatagacaaacaaacacaaaattcaaaacagaattacaacttcaaagattaaggaacgaagtcacctgatgatccaatgaatgatatgcatatgaatgatttcaccaggttgaagaatgaatacaaactcagaacatcactttcctcaagctttgaaaaagaatttcttgcttcacaaatcacttaacaacccataagagttttgtgaagcaagaactcaatgaacccagaaaaaccactaaaagaatgtttagaaagccttagaatgctcagaatatgaattgatcaagttaataaaacagctgagcatgggttctatttataacaaactttctaaccgtcagtaatcgattaaacacgctcctgtaatcgattatttagcttatgtaatcgattacatacgctcatgtaatcgattaaaccgttcaaaaaaattctgggtatatgcaacgaacaaaataatcgattattccgtcaagtaatcgattaagacatgaagcttcatattttgaaatacactatgtaatcgattacggattttggtaatcgattaagtcaggaagctttagaaatcatataaaactgtgtaatcgattactttaattggtaatcaattaaatcagcataacttgttaactacaacatgtaatgtaatcaattactattcgtggtaattgattaaaacatgaggatcatatattttgatttagcttatgtaatcgataacaggatgttggtaatcaattaaactgttcattaaagttgtttataatgtaactaaggtaaaataatcgattattccgatatgtaatcgattactttgttcttaaacagttttccagaaagcaccaagaacaaaataatcgattcttttcttgatataatcgattaactcagtatgaaatgttatttttccaaaaacacttgatttatttcaaaacttaaccaatatattaatgccttatgaatactctttcttagactaatgaatgatatgaatgcaatgtatatggatcaccagaaaccctttttccttttacatttaatcacaaatagttcttcaattcttcaaggcatgttgaaagttcaaaacattccttcttgaatcaatctatgctttgtgcttcaagcaactccgcctcaattcaacaatctccccctttttggctttaaacacgccaaatttttaattgaatagcattgggtcttatgattaattgaaggaactaacatagcatttatctgagctttttcacacctgaaaaattcaattcctttgtaagagcaagtgttaaaagcatatgtgattaccttagcattcattcataagacatatttgtttaatgcaattaatttgaacagttaactccccctaaatatctcaaattatgcagttcaaatttcagcctaaaaaatgcacagaaaacaagggcaaacagaggtatatgtagggcatagcttaattcaatttttctccccctatttggctttttaacgacaaaaaatgcaaggcacaacggatttaagtgaatagaaacataatattgcattaatcttggaaggaaaattacataataaagcaaaaaaaataaatagaaaatagagtacaaataacaaagaaaactaagactttaaaagtcttctgaatcatccattctaagatgagcttcaatgtcatctagcctagcattgatttccctaaaagatccttgagtttctgcctggaaatcatgatgcatttgaagcagcccatccattttggctagcatgagtgactcaaattttgtatgaagaggctgttgagagtccttttcttcttctccttcaaaattagccactggatcttcactatcaggaacaaaatcaggctcaggttgtgccatttgtggaagcacttgttgatgatgtccagccatcaggagtctttgtcaatccaagctttgtcaagtgctttttttggatgaggctgtttgaagagttggtgttgtccatcacttcattagaaacatcaatttgaaagtgatcaatgaatctagagatgagaacagggtatgggaagggatagttaacatgcctttttgcttttaacattatctcttgaaagataatggcccagttcatagggatggagtttgttagaccatacatcaattataagtcttcatcagtagcttaggcatggtttgttacccttggagtcagaacataggtgataaggtagtgaagaagcctattttttggtgccatgggactagtacttaacctatttctaataggtatatttgggtcagtgagcatttccctataagtacctattttgctataaccacctggggtttcttcaaactttctctccccatcacaaaccactccagcaatggtttcccacagttcaggagttataactatctcaacacccttgacagtagatttgaggtatccattcatggatgccttggtatagatatagaagaccttaaccaagtcagggtagtaagtacccttcatctccataaaccttctcagaccttgggtttctaacaatgcagggaagataaaaccttccttgataaaccagtcaagcctaaggtatttgggtgaactaatgggtttggtggcattgaactgaaggtagttcattttatcaaattctttattgaaccataggctcaacctatctggtggtggttgaggttgtggtttggaggatgactctcctaccttacgtttttcaatcctagcacatttggatgtagacatgattggcagagattaataacatacactgagggttggaaacacaaaggcttagatagagattagagtaagagagaataaggttggtgcaaagtcatagattgacacaagtcactatttatagagaagaatcactcaccaacattcagattattcaaaaatatagctgttagagatagttaatgctagttaatgatgatttagatgcttaattcactggatagggtagttacaaaccccagaaaactgtcagaattcacataacaacttaaataatcaatttaaaaacttaagtaatcaattattttagacaacctgataacaaattttacacagtgtaatcgattattccgtaaggtaatcgattacattgaaagtttccagaggttgaggataatttgtaatcgattatatgatgcattaatcgattatattgttcataataaccattcatatgggtatcagggcttatttaatcgattatcccgtgtggtaatcgattatttcaggaagaccaatattcctaaacataagtgtaatcgattacaagcttgcagtaattgattattccagtgagacacataattataaaatgaattttgatcgaagtaatcaattatcccgttgtgtaatcgattattccaggagaagacaatttctgaaatatgaagactaatcgattaccaaatcagtgtaatcgattacttgagctcaacttgcacactgaatgtgatttttaataattttaatcgattaactcgtggtgtaatcgattattgcagtaaatttatcagaaacagagcatttttacagcttgatatgaattttcaatcattcaaagacaaatgtggcatttaggctttaatttgtcataagaaatatacttaaacaatctagtatatgttaccttcatcaagaatgcctcgcatgtttctaagtgtataaaatctatcatttgggaagggtttagtgaatgtattagcaagttgattatgggtatcaatgaactctaccttgatgttacctttctgcacatgatctcttatgaaatgatgtctaatttcaatgtgcttggtccttgagtgcatgacatgattctttgaaatatttatagcacttgtgttatcacaaagtagtggtatctcttttagattaactccatactcttgcaattgttgcttgagccataggctttgtgcacaataactcccagctgagatatattcagcttcagcagttgacaaagccacacaagcttgtttcttacaatgccatgaaatgagtgagcttccaaggagatgacaagttccacttgtgcttttcctctcaagtttgcatcctgcaaaatcagaattaaaatatccaacaatattgattgatgcacctttaggataccatagcccaactttgggtgttgccttgaggtatttgatgatccttttgactgctgtaagatgtgactcttttagatttgcttggtatcttgcacacaagaaaacattaagcataatgtctagtctactagttgtcaaatacaataaggacccaatcattcctctatatttggattcatccaccttcttccctttttcatctaaatcaaggtatgttgaagttgccataggagttgcaacatctttgcttttctccatctcaaacttcttaattacttcaaggcaatactttgattgataaggaaagttccattctttatttgtttaacttgaaatcctaaaaagaatgttaattcccccatcatagacatttcaaactcattttgcatagctacagaaaattctttacaaagcttttgattagttgaaccaaaaataatatcatcaacatatatttgaaccaataggatataatccttgtgccttttgatgaacaaggatttatcaacattgtcccttacaaaagattgataaagtaggaacttacttaatctttcattccatgatcttggagcttgtttcagaccataaagggcctttttaagtttaaaaacatgattaggatgtttaaaatcagaaaagcctggagtttgttcaacatatatgtcctcctctatgtaaccattcaaaaatgcacttttgacatccatttaataaagtttgaaatccattatgcatgcatatgcaagtaatagcctaattgcttccaatcttgcaactggagcataagtttcctcatagtcaatgcctttctcttggttgtaacctttagcaaccaatctagccttgtttctaactatgattacacttttatcaagtttgttcctaaaaatccactttgtaccaataggcttaattgatggaggtctaggaacaagttcctaaacttcattccttttaaattgattcagttcatcatgcatgacatgcatccaatgttcatcttgtaagacatgattaatatctttaggttcaatttgagaaataaaggccatgtcacaacataaatttctaagagaggatctagtagagactctctttgatacttcaccaatgatattgtctagtgagaggtctcttgtggttctccactctttaggcctttgattgggtgttgatggaccttcttcagcactaggttcattcttttcattgatagacagtttctcaagatgaacattttgctctatttgacctgcattttcatcacaatctttttcctcttttgaagggttagattcatcacaaattacatggacaaattcttctatgcacatagttcttttgttgaaaactctatatgctttactttgcaatgaatatccaagaaatatggcttcatcagtctatgcatcaaactttcctagtgattcttttccattgtttaaaacaaaacacttgcaaccaaaagttcttaaatgagaaatattgtgctttcttcctttgtataactcataaggtgttttcttcaagatgggtcttatgagtaatctatttaaagtgtagcaaacaatacttactgcatcagcccaaaaatattttggtaaatttatctcatttataagtgttcttgcaccttctttaagtgatttgtttttcctctccacaacactattttgttgaggtgttcttggagctgaaaagttgtggcaaattccattttcctcacagaaattttcaaaatattcattttggaattctccaccatgatcagttctaattgagataattttacaccctttttcattttgaacaagatggctaattttctaaaagaatggaaagcttcacttttggatttcaaaaacaaagtccaagtgaatctatagtagtcatcaacaataacaagtccatagtgattaccacctaaactcatagttcttaaaggactaaacaaatcaatatgcagtagttcaagtggtcttgaggtggaaacaaagtttttactttgaaaagagattttggtttgtttccctttttgacatgcatcacataatttgtccttatcaaatttgagttttagtagaccaataactaagtccttcttaatgagtttattcatatgatgcatattaatatggctagctatcctatgccacagccatgtttcatctaacttactcattaagcatgtagtcttgtagaataatgcatggtctatggaaagcaagtaaatgttacctttccttttgccaatgtggattacttctccactcttaccatcacaaattatgcagcgatcttgattgaaggaaattttatagcctttgtcacataattggcttatacttagtagattatgcttcaagccttcaacatagagtacattgctgatttttgtattcaagctatcaccaatgcttccttcacctataatcttccatttgttgttgtcttcataagtaacatagcccccatctttaagagtaagatttttgagcaaggacttgtcgccaatcatatgtcttgagcagccactatcaagataccataaagaagaacttgctataagacatacctacaaaaagaacaaatcacttcataggagaaggtacccatttgagtttggatccaaataggttagttgcttgctttttcttttctacccaaatacactcaccatttgggacataaaatcttcttgtaaaacattagtaagatatatgacctttctccatacaatagtgacaaatcacagctttatatgagtttctaaagaacctattttgattgaatcttgatttcttctttttcttctgttttggaggtacaaatgttatcttttgaacattttcaaaactctttttgtaccccaaaccaaaaatgtcaccaaactatttttgagcactcaacatatcattcaaatcacattttcctttgttgagtttttccaagatatcaatcatctcattgttctttgaaacaatctgcatatatttttcttcttgattcaatctatactcatcaaaatttttttgcagcatttcatatttgtcactagatgtagaggaaaaggcacaaacacaaccacttgatttgtagcttgatgtaagtttctcatttttttccttcaagttacaaacttcagtttgtaattccgttatttttgcaagatgatccttaatacttttcttaagcttattgttggatttagcaagctttttagcctctttatgcatctcttgaaaagcaaaaatagcttgatcaagttcagaggttacctcatcatcttcatccaaaagatcatcattctcttcattaacaattgaggtgagacacatgttggcttcttctatttcagtggaggattcggaaattgaaaagattcattgtcctcccaagcaatgtaggcttttcttggctttgtttccctcttacctttgttgtcattttgttgtttcttgaagtaaattgaacattctgattttatgtggtcaggtttaccacattcaaagcatgtgaaatagttgtcaatcttcttggtgttgctagtattgttgttggaatttttcttgttgtttcgtgtaaatcttttgcccttattcttctttagaagcttgctgaactttttcacaattaagttcatgctttcttcgtcttcctcatcacttgagttttcttctttttccaccttaggtgttgcagcttttagtgcaattcctttgccttttctttctgcaccttcaccaaaggttagttgagataattctaattcatactcaagtaacttatcaaagagggtagccatgatcatttttgagagatctttagattctttgatggctatcacttttggttgccatgttctagtgaggcatttcaagattttgatgttcaattcttcagcttcaaatgtcttcccaagtcccaagagatgattcactatgtgtgtgaatcttgtttggagttgagagatgctttcattttgattcatcttgaacatcttatattcatgtatcaatgagtgctttcttgatctcctcacttcttcagtcccttcatgggtgatctctagcatttcccacatctctttggcacttgtacatctaacggttctgaagaattcatcagaagaaagagcagaagttatcatctttttagctttaaaatcatactgaacaatcctcttttcatcatcattcatctcatcccactccttgggaatcatattattatcaaccactttgatgggcaccctaggacccttttctattgcattccatgctcctggatcattggatttaataaagatcttcatcctatttttccaaaaattgaaattctccccctcaaacaaaggaggtctgtttaaggatgcccctttgatcgaaggtcgtactccgtcaaattattatgaattaagtgtagtactaggaaagtgactcctaggtcgtctctcaaggatcaattgtcaatgtttaagggattgaaaacgtgttggggggtttttgaaggaatttggcagaatatataaaattaaacagaaataataattaattgcaatgattaaaaacaagtcagacccttaggacagattgcgcctctaatttccttggttcacgaaagataatttgttctacttaattctcatcagtccagattaatcgactaagcgaagattaatctaaaacgtcattacacgaattaagcaaacgtgaacctcattagggcaagtttctcagaattaagcaaattgagattactgaatcaatcaatatcaaaatcattaagcatgactctaattcgaaaaatacagaacaaaaacccaaccaaggaagaacaagcagaaaacgaattagaagaacaagaacctccattaaaggtttgcaatctgtcctagggtccaaccctaggtttagccttccattaattcgaaattaacaacagaaacgtaaattgaattgaaacgaaacattaaacaatcttaagaacagaaactgaaaacgaaatagaagaagcagaaagcgaaatagaagaacaagaaattgcagaaaacgaaattagaaattagaaggaacaaaaacgaaaataaaactgaattaaaaacgtaattgtattctggaaaaaataggaaacgtaaactctaaaaataaagaagcagaaaacgaaaatattaaaactaaaggaaaactgaactaaaattgtgtagaatgtagtgagtctagaggggtgtgtttccatgggcacagaacccctaaatatatagtaactgtctaacctaaaagaatggacttttcctaacagttttagcccaaaatcactaaagataagataagataaaataaaataaaaacgaaatccatattctgatatggaaaatattaagcctaaataaaaacgaaatccctaaagataaaataaaaaataaaaacaaaatccataatctgatatggaaaatattcagcataaataaaaatgaaatctataatttgatatgggaaatattaagctgatgctgacgtggcgcactaatcttcaagtccataaattaactccaagctcaattaattattaaactgccctgtaaataaaaattagaataattaaacttaaaataatccaaattaattaaaatccgaattattggtctaattaaatcttaaatgagaaacaatgcaaaatataaacaattaagcacaagttagggattaaaatgagtacaaaaagataagtaattagtgataaatagtgactcatcacccttccttgaaggttctttgtgaagtattcattttcgaaaaaaaaatgatcttgagtaacttacaagacctaattcttgatgctaattgtaaaatatgggaacatttcacacttaaccaagaggggggtgaattggttaggtttggtaattcaaaaaattttcttcctttatctcttgcatagtttgcattacaataacctactaacccgaaatcttgttatagatagggggcaacatgaagattaagcattgcagccttgaagagttttgtcttttgacatgcccaactcattgagtggcatttgtattgtgtaacaccccgtaggcctccggtgcattatcattaataatatcatatcacgcttaaagcataatataaaactcaacggaagcaaggaatcgcttttcttgattcattatgtatggaataaaacatataacaaacaacacacacatatatacgacatatatttcacacccctactgatccagtttctcatgacatataccataaagacagataactaaaacacttaggcagattatcaattatacaacatttatactcagaaggaaagtctcatatacatatcataaatagttctgtacaaatatatatatcatagtccacaccatatcgtggggatacaatagaatgtcagccctcatcggggtatacagaactatacaacttaggagtacacacaccccatcccttatcaagggtaaatgtcaaaacaaacaaaactgagccttcaagctctccctgctgctcctcagtcaagcagcctagtctctactgggccttctgccctgagactgctctcttcctccaaaagagttacctgaaatcataaatccccacaccgggtgagacaacacatctcagcaagctcagggtccatggaggaatctcctccaccctggcccacttccataacacatacatcagatatcacaagcaattggcccactggcctggccctctggccctcataacaatataagcaaacaatccaaacatggtggagctacctcaacgcctcacatcatacaaacatggcggagctgcctcaacgcctggcggagctacctcaacgcctatctcagtgtgagactggaactcatacctgtgccatcccattgggtgctaccccttcacatggatgcacatatatggtacctccgagaatagaaggacctacctcaacttctatccccctggcctatggaaaccaattccctggaagctacctcaaccatgagctagccatgctaggaggaaaccaccatctcctagggaggtccatatctatctattggctaatagatctatcacaatcaaagcaccaaatcataaacacagatgcacacacatatcattaggaggatgcaatttaccaatgcatgcatcatgaaatgaccaccactcccccggagtgtggtgtggcacataagatgagaaatcatccccagggacactgaacttacctggcaaggtctcaatctgcggtattgtccctgctctgtggctctcgccaccaatagtctcaaaatcaagccctattcaaggcatatgcagtctcatcaaaatcaatccaatagacattcaatcagaacatatcatatcagaattcccctatcctggggttcaaccaaatcaagccctcactaggcttctcacggaccatacaaggtccaccatggctgcatacaaagcatctgaatcatcacagactcaatgcacagcacctaccagagcataatctcacagcagcctcatggttcaaaatcactggaacggcctaaaccttaaccacaacatcattctactagcctcccgggctcaacacaagcataataaaggctctggtatggctccaaaaccacaagtgacttatcacacaagccacacatacaagtcacagagccaagattcaaagttatccaaatcaaaagctgaaagctaatccttcatcaccaaaccgttctaaacaagtttctctacaggaccctaggctaattctagccccaactcatatgggtcactattcataggaaaccccaaaatcataatcaacatgagaaacttgagtctcttacctcagtggcgactagaaaggcctcaggacaagcttcctcgagctctggtgtccgtttcaagccttgggtctcagccaaaagccaattttgaggttttctctggagaaagggattctcactctcaaggggtttcaaagagaaaaaaaaaggatttaagctttccaagggtccctctcaagtttcaagatcacaaggaggtatttaggacaagaaataaggtcctaagaagcttggtgcaagcattaatggaggtttggggcagaaggaggaagaagaacagttctccatctcattttcgcattttggcccttatatagtggccctgcccgaggtctggcgctaatcgcgccacatctggcactaatcgcgccactaaggcggtgggtttggcgctcccagcgccaagtttcagaagatctggcgctcttagcaccacatttggcgccaccagcgccagctgggaatcatggcgctcttggcgccaaaactggcgccccaagcatggagttctagagaatctggcactattggcgtggctctggcgctcttggcgccactttccagtgggtttggcgccctcagcgccaaccctggcaccatccgtgccacacccttaaaaggatcagcgcggggtctggcgccaaccgcgccatgccttagggttatcacatattgattgttgcctcttagttcatttatgtgtacatcatgcatcatcatgtagagataggatgattgtttataaagttaaaaaattcttcaatgcataaactctttattttaattgattacgtgttatctgtaatcaattacacaagtctgttgagaggcttgcaaagagatcttcattctagtttaatcgattaccaaatatccgtaattgattacatagttctattgagacaatgtctggttttcataagtctcagctttttcgattatcaggtcatcatgattacatcgttcttgaaagtgttcctaggaatgatgaaaaacactttaatcgattaaatcaagaatctaatcgattacattattcttgaaagctttttaggttttggaaagaacactttaattgattaaaatgggaatctaatcaattacttctttgagataatcaattatattgacaatttaatcgattacaagcggttaccactattttgtctataaatagccactaacaattacataggcaatttaagggattacagacagttataactattttgtctatatcaccttatgttctcactttcatgcattcaaatgaatgagttagacaaagattttttgactcacacactctagtctttgtttctgaaaaattcatggttaaagtgagttgttaacatcttgtgagattaagaagaaatccattcaatcaagcattggttcttgcatttgatagactaggttatgtctctccgtgaatcaattttcatatgtttttacatattgttgcaacatatgcatgagttcctaatgcaggctagaatagggtcttctagtttaagctaagggtaggtgtctcttaggctgtcattcacaaaggaccctagggttgggtgccttagtatcattttctaggtaggatatgagattgattatgatttcttgtaagaactcaagtgcatagtaaaaatctaatttaggttaaattagataactgaagtagcttttctaaaaatagagaatgaactagttaaatcttgttgttcatcttctcttgaatcttacctctttctctctcacaatctttatcaatttgttgagtttaaagatattttttttttaaaaactttaacaaaaggatagtgtagggtgattgattcaatattggttttaaataaaaagtttgtgatacgattcttggaaacaaaagtttttcaaaactatttttaactatgatttgttttcaaaaccaattcacccctctttttgtttgtgagttccatcatcttttttgatcttgatttttcttataaaacaaacattgatcagtagtacctactagattacataaattcctttttatagccttaagatgtgattcttgaggatcggactgaaatctagcacatagacatatactttgcatatactttgctcatagaattggaagcatgcattagagttttcataggcttagcatcttccattttaaatttcttcagaagttccttagtgtatttttgttggtggatataatatccttagttgtcttgcttgatctgaagccctagaaagaacttaagttctcctgtcatactcatttcaaactcacttttcattagatcagagaaatccttgcacagagattcattagttgctataaatataatatcatcagcatatatctgaactataatgaaatccttgcaagcttctcttttgaaaagagttgtatctactttgcctcttttaaagccattttttaaaataaaggtgcttagtttgccataccaagcacgaggtgcctatttcaaaccatatagagccttttgaagtttgaaaacatagctggaaatatatggtctttaaagccaggaggtagtctgacttacacttcctcttcaataaagccatttagaaaagaacttttaacgtccatttgaaaaagatttatatatgtttttatgagcaacaaaggaaagcatgattcttacagcttcaaatctagcatctagcaacaagagtaaaggttttaatgaaatcaatacctttttgctggttatagccttgagttactaacctagctttgtttcctaccacctttctttgttcatgtagttggtttatgaacacccatcttgttccaatgatgctcttgtttttaggtttgggaacaagagtctagatgttgttccttgtaaactggtgaagttcttcttccatgatattaatcttgccatcatctgtcagagctttttctgttgggttcgatctgatcttgtggatgatggtggacaaacttccagtccttagtctgtgatttatgatctgaggattcctcaatctgatgaaggatttctttagactatttaatctttctttctttaggaggtacataccatcctatctgcaaaatcatcctcaacatttgataaattcttatcagacgttagtccatcattgaatttaacatggatgtattcttctacaactaaagttctagtattaaaactttatatggtttacatgtatcaaaaaagcaaagaaatatccctttatccactttagaattaaacttagccagttgatctttggtgttcaggataaagcactcacatccaactggatgaaagtatgaaatattcgatcccctccctctccataattcgtagagagtcttttttattaatggtttgattaatattttgttctgagcatagcatattgtgttaaatacttttgaccagaagtgcttaggaagtgagttttcacagagcatagttctagcaatctcttgaagagttctctttttgtgtcatctagctgtgaagaaagacttgtcattttttgtcttgattatacacttgtctttgttgaaggaaacaatatagccactatcacaaaattgacttatgctaagtaggttatactacaaatcttcaacatatagactttgtccattaaggcaagagagggaataccaattttacctatatcatatatctttcccttacctatgcctccaaaggcagctcctccttcatgtggctttaggtctaggaacataaacctttccccagtagcatccattgtccagataccaacttaaaccctgccttttcctaccaaggatatctacaacaaacactatttgagattttggaaaggctgtgactggattatttgtttggaaagactatttgagattttagtacccttagaatgtccaaacttaccacagaagtcatatttgtttggaaagattgtgacttggagggtgttgttcccttttcaaagcacatgccataatttcaaaagacttggtaagagtctttgaactttccaagaattcccaaagtcattagtaagacatgcaacttcttcccttagtttttcatagtggaagtttcattagtcttactagccaggctcagactctcttctagagtttggatcttcttttttcaaatccttatttgatttctttaattcactgttttcataagcaaaagctttgaatttttctttaagctttttacattcaagagaaatcttatgacaattctaaagaagaacatcatatgacatataatcttcatagtctgatgatgcacaagaagaagtatcatatttagaataagtttttacctaaccttattgtttgtatctaccatgagataaatgttggcttgttcatcatttgaactgctacttttctcaatgtctgagtcatcccaagtgaccatcatacttttcttcttcttgtccccaaaatatctatttttcttcagttgggaacattcaaccttcatatgtccagattttctacactcaaagcaaactgatgttgggtggacttgatgtacatcttcatcctgtccttccattaggggtagtcttctccaacaaagcatggtggtcttgtgagagatgctccctcaatgatgaactgatgttggctatttgtcatctagatcttttcctttacacgttgttaagtgctcaacccttagaggctgagctctgataccaaactgtagaagcaaataacaaaagaagggaggttgaattgtgttttttaaaaatttaaaacttttcttaagactaaaaacatgtttatcgtttgatgaatataaacctaaaacacttagagaggttttgattcaaactgtattagacgatgttggctatttgtcatctagatcttttcctttacacgttgttaagtgctcaacccttagaggctaagctctgataccaaactgtagaagcaaataacaaaagaagggaggttgaattgtgttttttaaaaatttaaaacttttcttaagactgaaaacatgtttatcgtttgatgaatataaacctaaaacacttagaaaggttttgattcaaactgtattagacgatacgaaaaacaattttctttgaaaaaccaaagcaaatataagatctaaaaacaaattcagcctattgttagttcaaacaacaaagaaacacaaaaggaggctatattggttcatctcaaacccgaggctcattcagttcttagcaaccactaagtttccacttacttatcaaagttacaagtattgttcaatgccacttctagatcttaaacttgcaagctttaccctaagcttaacttaaacccaatattctttgtcctaccaaaccattgttgtctctaaacaaatcaataagatttgttggaagatttctcactgactaaagtatgatcgtctaacaaacggatatgtcactcaatacttttagttttttctctaaaggtatacaaggtgttttgagagcttagtatctctacaagaatttacaaaaagatttacaagaaataataatttgcataaaatatttgtgtcttgtttttcaaagcttcttctaatattgcctttatctccaaggtacttgcataaagaaactttaatgatgaccaatcctctttaccctatccttagacataaaatgattgcttatcttcttcagatcatgattcaaaaaaaattccaattaccattgaaattatagaatcatgcaaatgagttatcaaaccatatacaagtacccaacaaaagagagaagttagctacttatagtcatagagaaaagattccaaaccgttaagaatgtctttgtctcttcttttctctcaaacgtaaaaatttcataaccttaaactaggttagacttttcctatttaaagcaatgggtcaatggccactataacccacaagaaaacaaaacaaaaagacaactaaaaatcttacatgtctcattgcacaggggtgtgattcttgttgtacgggtctgcatctttcaaatagatcagaatagcattgcacgggtgcacatactcctttataatttcttgcacaggtgtgagaggctccaaagctcttaaaaacttttttttgtctccacaaaaccttcaagctttagatttcaaatcgaatgatccttgacacctcaagatcacttttaggacatctcctttgcttggtccttgcttccacaaagctcctagaaaacataaggaaaaaaaaaccaagatcaagcataaaaagcataaactagtaaatcctagttaaaccttgctttttattcaaactttactcaaatggatataaacaaattaaaagcacaagagatatcaactaatttccctaaatgacacaaaaatataggaatttatggcaattattagtgacccatccaaagtgaaagttgtattgcaatggaagcatcctaagtcaaccacatagattagaagtttcattgggctaactggataccatcggagattcatagaaggattctctaaaatagtagcactatacactcaacttgtaataacccacctcgtcgctacgatatcactaactctaatcgtgtaatttcaaattttaatgaagactccattaatttgattatgaaaatgagagtaactttttcgcgataatacctttatcaaacaatgcacaaaacataaatgaatacatatgtatgtgtattttaaaccattatgtatcattcacgtgttagaacttaatttagtttttacatgtatttatgcttggaatttacatgcccaatcaaaaaggaatcaaggaaccaactaaaacaaaagaaagagttgataacaaaacgtaactcttttccaaaaaaaatgaatatcaatgttatcacatcggcttggcggctccaacaaaaaggatctccctccaaagtcacctactgctgctcatctgctcccacgaatgaaggttcgcgatcatcacaggtaccaaccacatggtataaaaatttgcaagggtgagtttattataccaaatcaacaagcaccaaacaacaataattagtaagaaaacaattatgatagccacaatcattcttagcaatcaatcagttgaacacacactcaacaaactagtcatcaattttttccacaattcaaaaaaaattatgctcagaatgttgcatgcacctgactcaactctcagaatataatgtggtgtcattctcatggaaatagtctcacttaggaaaatgatgcagtagctcgtcgaggtcaccctgtcgtgcacaggttgctccccccatggctatcatccagagtcacaagggagttccaaatagagtaatatgcccctaagtacccctggtacttactgccaccattctattttcatccatgcaattatgaagtacaaaacatgggcaccatcaatgcactgactgtggatagggaccggaatcctaaacaatccctttttctctctagggatgcttaaaatttgtaaatccttcctcgtaaggatatccaataagtcatgcacccccatgtacatacacagcatacaaccatgggctcatcaatgcactgaccgtggatagggaccaacccttctctgtagggatatccagtcatgcacccccatgtgtatccatagcatacaatgacattatcaacatcaacattatctctcatcaatgtcattatcaacatcaacatcatttcatcttaatgtcacaacatcattttgtttcaatatcatcatcataaacaccaatatcatctcatatcaatattatcaactatactatctcatttcaacatcatcaaccacatcaataatatctcaatgtcacaacatcattttattccaatatcatcatcataaacatcaatattatcaactatattatctcacttcaacatcatcaacaacatcaataacatctcaatttcatccacaatccatattaccacgagactgatattttaggaaaattataaattaaagagaaggactacaatatataaaacacacttttatgcccatttaaaaatttaataaataattaaatataagaacatattataaaattttgagcagagtctcctctgtaattaagacttttcccaaaaatccaatcattataacaacatcattcacagttttattcatcaataacaaattcatcgcatcccattagttaaaaacacactttttccttgaacatgagcacacaacaagaacaaacatacgtcaacaataaatatatcgcatctcattagtttaaaacaaagtattcttttgaaataagcacacaacagggatagacatatatctccataattgggttccctgacccctaactatgatatcaaaaattgtaaccaaacaataaactccccttagctatctataatttttcccgttagctcctcagggtgttgttttaagatccctcaagttcgcgtgctttggcccaaacgcaaagctctatataacaaattgaagacgatttagtatagatttcaaagacaaggtcaatattaacatttggggtcaaatactcactcaaatttaaaagggactaaaatggtgttttgggagtccacatcaaagagacatcattttgaaatttcgatcacactaatgtgaccagggctcaacgaaggtcacaaaaatgacatcaattttatcaaaaggaaacttttacatctcattttcaaagggttttcaaaggaagtgtaaaaaaacccaatagcagtacccaaatcacaagagatatcaagagagacttcaaactagttaggagaagacaaggaaaccatggttacctcaaagaaatcaagtaatgaggattggaggcttcgttctctatcaaatcctcgagttgatttttgaagattatgctccgattaaagtgttcatcttcgtgcgatggtccaacgacaagcaacggtggcttgtggtcaccagtggtcgtgggttgtggaagaggaggttctagggtttgggtgagagtttagagagagaggtgaaaatgcatttttctgcgctgttggatgtacttataatctgcatgtctcactaagcatgccctgtctcgctcaacacagtttcctctgtctaggaattatgcttagcgcaccggtcgtgcttagcacggtatccaatgttggtattttacaaaccccaacagtcaaaatattcagagatggattgtgaacttactatcaaaacttgaaggcgatccaacggttaacgagtctaggattgtaattttactaaaataggttttgggtcaaactatcagtcacacattttaaacatagatcaaacaaatttcacataacttaacatccacaccaagcaattgcacaagggtaatttacacaacaattcaactaatctaaacttatcaaataatcaaataacacaacaaatacatcaaacatctatttcaagttattgaaattacagggcgtttcacaactcacttgtaaggactaaccttttgctagggcgtttcacaactcacttgtaaggactaaccttttgcttggactgaggagtgtgagtagagttttctataattgtaaaatcaatttagtacttcacctatattagtgctacctaattctactgaaccttttgaagtttactgtgatgcctcccatcaaggattgagttcaatgagttgtgtactaatgcaaggagagaaagtggtggcttctactttaaggtatttgaagattcatgagaagaaatatcccactcataacttggagttagtagttgtggtgtttgctttaggcattatctttatggaatcaagtttgaaatttttagtgatcacaagagcttgaaatatctatttgttcaaaaggaaaacatgaaacaaatgcaatagtttgacttgactcgatcatatgcatggttccctatctgatcggttcaatccaaattttaagactattacatgataaaagagaataaaatttaaaaaagaaaagcaaaaataataaaaagttgaaaagaaattgtaggaagaagaaaagcaggaaaatgaggtgataaacgaatgacacatggtccaataaatatttttttctctaaataagatagatagggtagaagataaaagtgtcatttacgagttaaaaaatcaaagttatatacacatttttttattttaataaaaaagaaaaaaagaaagtcgcatactaatttttaccgaaaagtcacgtactattttacaattttattaatttttttaaaagaatcatatatataattatgaatttcataaaaaataattaagaaaatataaaaataatgtaataatgattgaattcatgactaaaaataaaaaaattaatttaattgcttaagtaaaaaatatgaaaatatatggctttcattaaatgctaaggtatctcttattctcaatttaccatgtttgagggtaaattttcataatatactctttttgataattattaaaaaaataaaaagaaaagaagttgtatgtctttaatagaaaaaaattaaaataagttgtgagccttgctaagacttttaagaaaaaaaatattaaaagagaaagtcatatactattttatggctttattttattaaagaaatataaattcatatatcatatgcgattttataaaagaaatataacaaaagaagtggtaaaaaggtcgaaggttatatatgactttaataaaaaataaataaaaataaaatttctgaatatttataatttaataaaaaaataaataaggaaagccatatatttacaaaattagtgtttttttaaatataaaaaattaatttgtaattatatttacaactttcataaaaaaatatgtaattgttataatgttgtaaattaataaaatttcaaaatttagcccattttagtaataattattcaaaaagattagcctcagtaggtaaaagaaagtcaataataacgtcaaaagaaacaataatttgaaggaagcatttggagaaaaataaaagaatcctattagatagacactaactcgataaggtgtctcgtagacagtgtgagcacatgcagaagcctcatattataaagtacagtacacatgtgacgaaaaacaactcgagtttatgtgttttattaggaggaaaaagaaaaaataaaaaaaatggaatttaaattgtagacaaaataaaagaaagaaaataaataaaaggaaaagagtatttaaaaaagaatctaattataaattacacctaccaccactgtagttggtgatcagatcgactgaaaataaagagttgaatgaagtcaaatctcatccttttagtttattgcaaccgattccatacctttgcctttctactctgatcataagttgttcttgaaatcatggatgttgttgaagtggtaggtgaagcgtttctctctgcattcgttcaaactgttttggacaagctagcttcacctgaggtccttggaaagaagaattggcttctaaagttgaagaccactttgatagtggttagtgctgtgcttgatgatgctgagaagaaacaaatcactaataccagtgtcaagcgctggctcaatgatctaagaaatgctgtctatcaagctgatgacttacttgatgaactttctaccaaagctttcactcaaaagcaggtaagcaacttgttttctcacttttttaataggaagatggctagtgagttaaaaggcatagttttcagattagagtgtcttttaaaactcaaggagaatcttgatctgaaagaggttgaaatggagaatgtgtacgggcaggctcagaaagttctaccaacaacatctgtgttagctggatctcatatatatggtagggataaagacaaggaggccataataaagttgctattggaggatactagtgatggtaaagaagtggctgtgatccttattgtgggcatgggtgggattggaaaaactagtttggcccaattagtgtacaatgatgacaatttgaagcagatgtttgattttaaagcatgggtttgtgtttctgaagaatttgatattttgaggatcacaaaaactgtgatggagacggttactcaaaagccttgtgaattaattgatctaaattcagttcaacttcatttgatggaagtgctggcaggtaaaaagttcttaattgttttggatgatgtctggacagaggaatatgttaattggagtcttctaaaaagactatttcaacatggggctaggggaagtaaaattcttgtaacaacacgcaataagaatatagcatctaaagtccacccagttcaagtttatcatctaaaccaattgtcaaatgaagattgttggtttgtgtttgcagaacatgcatgtctttccacagaatccaatgagaatacaacaacactagaaagaattggcagggagattgtaaaaaagtgtaatggattacctttggcagcacaatcacttggaggtatgttgagaagaaaacatgacataggggaatggaataatatattaaataatgacctttgggaactttctggaagtgtgattccagcattggaaattagttattattatctatctccacaagtaaagcgatgctttgtatactgttcattgtatcctatagattatgaattttggaaaaatgaattaatcttgttgtggatggctgagggtcttttaaatccccaaagaaatggaaagactttcgaagaagttggtgacgactgttttgatgatttggtttcgagatcatttcttcaacattcaacaagttggcctcagcaaaaatgttatgtgatgcacaaactcttgcgtgatctggcaatatcccttggtggagaattctatttcagatcagaagaacctgggaaagaaatcaagattggtgtctacactcgtcatttgtcatttaccaaatttggtgatctagtcttggacaactttgaagattttgacaaagcaaaatttttgagaactttcttgccgatcaattttaaagattctccattcaacaatgaaaatatgccatgtatcataatgtcaaagcttaagtacttgagagttttatcattttgtggcttccaaagtttaaatgctttgcctggtgcaatagataaattgatccatttgcgttatttaaatctctctgacacatgtgtagaaacactaccagagtcattgtgtagtttgtacaatctacaaaccttgaagttgtctaattgcagaaagttaactatgttgcctagtggcatgcaaaatcttgtaaacttgcgccatcttagtattcatggtacttctataaaagagatgcctagaggaatgggaaaattaaacaatttacggcatttagattcctttattgtaggcaagcatcaagagaatgggatcagagaattgggaggacttttaaatcttcagggtccactttctattatccagttggaaaatgttacccaaagttatgaagcattaaaggccaggataatggataaaaagcacattaacagtttatccttggaatggtctgaacgtcacaacaatagtcttgacttccaaattgatgtagatgtactctgcaagttacaacctcaccaagacctggttttcctatcaataagtggttacagaggaaccagatttccagattgggtgggaaatttttcctactacaatatgacacatctaagtttatgtaactgtaacaactgttgcatgcttccttcacttgggcaactgccatctctcaaggacctctatatttcatgtttgaattcggtgaagattattggcgcaggtttatacaagacagaagattgttcttttgtgaaacctttttcctcccttgaatctctaaccattcataagatgccttgttgggaggcgtggatttcctttgatttggatgcttttcctctacttaaggatcttgaaataggtcattgccccaatctaagaggagatttgccaaatcaccttcctgctctggaatcgctgaagattgaagattgcaagctgcttgtctcttctcttccaagggctcccactctccgaagattaaagatacgtggaagcaagaaactaaggatgcatgagtttcctattttgattgaatctttagaggtagaaggaagcccaatggtgaagtccatgatcaaggccatctctaatattaaaccaagttgtctacagtctttaaaattgtcagattgttcatcagccatatcattttcagatggtggtttacctgcatcgctgaagagtctaaatatctggggtcttaagaagttggaattcccgacacaacacaaacatgaattgctagaatcacttgaaatacatgacagttgtgattcactcacatctcttccattgattatctttccaaaactcaaacgtttggtacttgtgaagtgtgaaaatatggaatctctcttggttactctgtcagagtcatctaacaatctgagttcttttgagattcgtgactgtcccaactttgtttcattcccaagagaaggattgcctgcacccaatttgattcgtttcacagttgacaattgcaacaagttgaattcgttgcctgatcagatgagtactcttctcccaaagttacaatatcttcatgtagacaactgcttggaaattgagtcatttcctgaagggggtatgccacctaacttgtgatcagtaaggattgccaattgtgagaaactactgagaggcatagcatggccttccatgcacatgcttacctctctctacgtccagggtccatgttatggaatcaagtccttcccaaaggagggtttgctacctccctctcttacatctctgcatctatttgacttttcaagtctggaaacattgaactgcgaggggcttatccatctcacatcccttcaagaattagaaattaatagttgtcataagctggagaacatggcaggagacaggcttcctgcctctctaataaaattaagcatacatgaatgccctatgctgcaagagcgatgcctcaagaagcacacacaaatttggcctaaaatttcccatattcatggcattgatgttggcaggaggagttagtgatcgagcatgatcaccaggtaattctcctgctttaagccacttcatcatctaagtctaaccaaggtttagtcaaggatatgtttcatgtcatgtctttcttcgtttatgtttaacttagttattggcttattgcattcaagaagttttagatcagctgctcagcatgatacttgagtggaattggaattgtaaaccaaagcaaattcatttgtttatactttctttacagtgagcattcatgtacttttaatcaaatctgggttctatactttcttgtatgaagttgtaaaccaagaagaaataagaaatatttcattttccaatcaatccaataataacataatattcataatatagcaccttaagttccctttcattttttgatttgcgaaagaactaaaacagaaaataagtatgaaattcatggtagaatatgtaagtagttgagatattgaaactttaggctcacattttgctgatgtctcttgtggacgatttacctaatccaattgcttttgaaataaaaattaatgtagtatatatgttactgaactacagggaaggaagcagcatattatcataggcaacatatgggatcgtccaaattgaattgagtgaagaatgttacttatggtcctttagattcaaagaaataactacaggtattatgtatgcaacattgataaatccttcaatgtaacatttcactgaaaaaatgttgctcattaatgtcattgtatcttaactttctcaatatatcagcactcactggtggctgtttcttcatattgcattgtctgtcaatgttgaaagtgtacattatgaatttaaaaagcctactcaggtattgagcatttatcaaaagtttacttaataagaacttaattttttttttcaataaataattgtttgtaacttcggaaaaagagaatcgagttgattttcttacatagaatcctcatatatgtgtgagtaacacatatggttgtactttggttaatatacgtgctattattcagttgattgaggttggggtgaattcacgagcctggaaaacttatttttgtattttgaattaatcaatgtgacagtgaaactttctcaataggtgatttttaattggaaggcttttcattggtacaatgtgaaggataaaaaggtgtaccaggccagctacatagaatggtctcaagcttcccagttatatactgacaataattgaaaaatactgcataccctttaactgctagccaattcaaattctctgccactacattatgaggtttttccttttccattaatattgtgtttgtgttgtaggaaattgtaatatactgctcttgtgagtaagtcgtcacttatgtggtaccttcttcattatatggagagtgtccccaagtcgttttgattccaaacaagaacccaggaagtttgaaggatgcgtgatggctaataggtaaggtctttgatctttagcattttaattggactaccaaatagcatattttatggaagtcaaatacatttcatggtgaaactccactacaatagcctatctttaatttattcatgaccatgaatttttttttcccaatagtattgaaattccacagccttcgtatttctttctctctttctcaggatacacaacttctaatcagattgtagcaaatcaataagcattaagcaatgttctcatatatgacttggcaaatatccataatttacttcttattcttaaaacatttataaaatgttctttatattttgtttctgtgtgcaggatgggccagaatttcatatatatggaatgtctccgtcctgcttcaattgagaaatagtcaatgtattgatgctttaacacagttttttcatagttgaatacaatcagattgctgcaataaaacaagacatctctactcattgtctttttcacaaaatttattgtcaaaaacttctcttgccattattcaccaagatgtagttcacaacttttcaatcacttgctagagatgctttgtaacatgacctttcaaaaaaatttgcattagtatgcatagttaagcatacaatataccgtggaaataattatcatcagaaaaacctttaagcaaaacactgatagctcatctgtttatgtgtgtaagctgatcttccaaggaaaaataaggattaagcgaggacaaggtctgaagatgacagagtcctttggagaagagaggagaataatgaaaaactcaataggataagattgatccatggtatttcctggagcatataacaccgtcaactccctaagcgtacaagccttaaggcatacttggcgacttgggatgggtaataactattaaattcaccaacataaagctactttttctatgaggattcatataaaattgataaggatttggatcttcattttaataccatagattcatgaatgaacttatcaatcgcacctttgatttgaaataacaaaatataggtgtctaattacaattcctgtctagtatgaatagaagaattgcaaaaatataacttaaacatgattttttttttttaaataagacaatgtttttttcttaatcttatattttattgttcctcacatgccttacatcaattttgtaacctatgtggaacgtgtatagcaacaatagacgatgattagaaaataaaggactgtgctgtttgagaaggggagtcctaatttcattcttagaatccatcaagcttatcattctttatgctgaattgggaaatttgctttgttcttactcattattatttcttaatttcctttgtattttactcaagagttttgtgttttattaatttgaaagggagatagcatgtgtatacatatcccatcagttgtatgtttgtttagcttacaagcttcagaatgaaaagctatatatcctgaattagaatgtccgtatcctaatctcttttaaattttgagctgatactgcaatgaggtctttgtttttttaaagttttgtatggcaatggagcgtaagcttcaagtcttcatgcttttaacaaacttttttgtgttctgtttctttgactttaagaaaaatttgggtgtgtcacttcctatactccttatgtggggagtacagccaattgactgtccttaattcgaaagagaaactttgaattgctgcatttgctatggttgtttacatattttcataagttgctaatgtcaatgcatgaaataattgctctcagggatttgttcaaattgacaaggatgatcccaacctactctggttacatctcctatcggacctgtcattcaggtatgctgacacacaattgaaaaatgttgccttgcttttaactagtgcttgttatttctctgcatctacgcattttgaatctatacctttttgctgaatattgtggttcagggaactataagttactatgctctggagccctaatgtgtacagggagtgaattccataacaatttactgtttgctgaactcctgacaccaatgttcaacgcgagataatttataggttatttgtaattataggcacgtcttatgagaataatatttattagaatttgattcataggcatatcatcatatcatctataattatttgtatttatagcaatcaacctgtacaaaatggactttgttgtgtaatttagacacacgatttcagactcgtgcatatttcttttttctccttcaacaattaactattcaatttccccaattcagaaagtgaagcgagataatttattagtaaactaatttctaaagcaataatgtattttacgtttgttggtgacctcccaaaaataaaatcttcctaatcaatgaaattagtatcctttgctggataatagatattacaagtttgcttgacagatgacaacaaatatcaaattggtctttataaacttttgaatgatatggcaaaattgaaatgaatgataaatatagcttactccacactgttaaacagtaagggtaatgacggaaattaaccatgtttcctttaagtacaacgccaaattaaaacatgaaaacttcatctcttcttagttttgaccttcctgaccaatggtttttacttttcctgctaaatccacaagagcacgaatgaaagaccccacctaaatcttccacatcgctagaagaaagtgctgaccagtgtgattttatgtgccagtgtgaacttagagcatagtggaagaacctattttaatattttttgggtctcataatattacataagcgacaataatttggtcattttttctctagtgatagaatccaatttggattcttggattttccttgcacagtcaagaaaaaagaacctttcttttccttcaaatggtactaaactttaaaaaaaataggaattcttccctaaaacctaacatttagcatggaaaactcgtgaacaaaaattgtagtagatctagtagacaagggttcttgagctgatcttttatgcatcctaccaaaaggtgtattatgaaaatgatcatgtttagatacttgagtgtctgaatcagaagcagaggaaagtgtcacatctgccacatattcctcaagcttccaccttggggaaactgaaactctcaattttgttgtgatgggagtttcatcccaagaatgtacttgactgccatttagatctgataaagcaaccatcagtctgatgaatccttgtaatctcccgggctcttgtgtagactcaaaatgattttccagaactcactccatacaattaagccaaaacttgaaaggtgctcacgcttctctggtggaaatttgacatgagtttctcatttgacaacttcttacaaacaaatccctgttcgcaggatcagctcaaaatttttaaaagattaagatatagacatctctaacttaggaaagagaaacttttgacaaaagaatttgtgaaacagagtgcagagatgtcttgttttattacagcagtctgattgtatttcacaattgaagcaggatggacaggttccacatataagagattcagtctccatcctgcaaacacaaacaaaatatatagaaaattttatagcagttttaagaataagtggtaatatatggatgtttgccaagtcataaatcaaaacattgcttattcctcacaattttgctaccataaaattgtattatgttggaatgtccagctagtcagaaggtgtttcctgagaaggaaaataaagaaataaaagatggttttggcatttgaataataagattaaaaaaaattcatggtcatgaataaattaaacatgggctatattgcagtgaagtttcaccccttaaatttatttctcttccataaatatttgtgatttagtattcccattaaaatggtcaagatcgaagaccttaccaatcagctacctgacttcaaagtttggatccaaaaaaacttgccagaactcactccgtattgtgaagcttataactgcaaaggtgctcaagcttctcttctggaagtttgatatttgtctctgaggacattatggaaccctttcacactgtttaaagaacattactccactctgatcttgtgcatcaaaagcattgaatgtatgactccctttcttgcggttctttcccattcagagcatgagagcaatggtgtcaagttcaaatcaatattgtttaatgggacaagtataggccactggacattccaaataacagccaacttggaaaaattcaagattgaagcagcatgggaaaagcaatattaatgaaaaagcaaaacctgtattgttatttctttttgatagctagcggagcttaagcaacagacgttgctcaatttgattaaggcaatcacatatgttccctttgataatgtgctgattctctgcagactcaataatatatatacgacatcaattttcattttagaatcaatttgattcagtaaatcatacacaagatatcagcaaaatgtgagtcagaagtttgtgtatctcaactgcttacatcatctggctttaatttcataacagttttcatttttagttccttcacaaataaaaataaaaaaaaataaaaaacaaaggaaactttatgtggtatattatgaatagggttgaataggtttttagccctccaaacaagacaatgttcgattttagtatctcaaaaataaaatgtttcttcctggtccctcgtttaaggccattgttcttcataaaatatcatttcctttggttctctcatttatgaaaatagggaccatatatgacacatttccataaatgagggaccaatagaaggatttatttttgaatggtgaaaagcaaatattactctatttacaggagtaaaacaacatatttaacccttacgaaattatactattgtacattagagaatgaaatctttcttatttcttctagatttacaacttcatacaagaaagtataaaacacagatttacactactaaatgttagtagttgcgactttccttacatactcaagcctgagactgattagaaagctttgcgaatgtgtttttcatgaagcaattgcgtaccgctgattataataagcagatacctttcttgtttaagtagtttgatacttaatgggaatggcaaatgtaaaaaaaaaaaaaaaaaagtaaattaatttgtatgtatcagcaaactaatttatcaaccacaactaatccaagaattgttgaatgtaataacaagttaagcagaaaaggagaaagatgtgaaaataaattatatccttgactgaaatagttttccttttgatacacttagatcgatgatgatgaagtaagccatagatggagatttacctggtgatcatccttggttactaaattaattatccgacaacataaatgccaccgatatgggaaattataggtcaaatatgagggtgcattaagcgtttttgcagcgaaggacatgacaatatgcatagttttataagagaatcaggcagcttttgacaactacgaatttcaaattttatgagggatgtgagatggagaatacacttccagtccaatatcaccataccctcctttgggaaggacttgatgccattacatggtcttctggaaacgactcaatatccgggcactcgtatatgccaacaagagtactcatctgattaggcaacgacttcaacttgctacaattctcaactataaaagaagttaaactgggcgtagagacaatccttctctagcaaataaaacaaagttggagcagttgtgaatctccaaagaactcagatttttaggcgactctgacaccaaaaccaaaagagattccatattttcagttttcaattgtgatacatttgagattcggaaaggtaaccaatgaaaatgatgtgagcgaatcacaaccccatatcgacactgatcctagtaactaatgtttgtgttgcgtcgggaattccagtcttctaagacctaagatattcagagtcttcagtgatgcaggaaaacgaccacccggaaatgaaatggctgatacacaagccgataatgttaaagattggagacaagttgggtggaagttatcgatgacctcgatcatggactccaccattgagcttccttttatttccatagattctaccaaaagaggaaacacatgcagcgctactttattgctgttgcgtatctctaatctttgagaggcaggaggagccttagattatttaatctagaattctgtcataatatggaatgattttaataaaaagatgtctaatataatagttattagattgaagccattaggaattatttttaagttattaaaataagtttctcttctcaatttattaaggttaattttggcattaaagaaaaagaaatttgaaaagggaagttatgaaagttattaaaaagaaataaaagataatttcactgtctctctcttttacattttctctgagacatgttttctttctaaaaaaaagtaaaatggagaacacaaaaaagtttaaagacaagttttgaaatgtttctatatcatcataaaaactaagtaatgaaagtcatagaaaagagaaacattagtaatattttctgaacaacaatatagatccgaataagtttttaaattttttcatagaaattacaaattataataaatgtgaaaaatatgatatccaaaattttgtagtgtaatttcatttatgatgaactctaaaaaattagacattaaaataaaattattctaacaattggtatgagatcaagttttggatatcattttcttcattagagattctttttaactcctttttattttcttgcggaacgtgtaatatactggaatgtatatgaattcgctgggggcgcatttaaaaaaaaataaaaatacactgccattctttcttattagaagatggaaatgctttaattggccgaaatggttatgaaggcctgcacgtgaaaatgtatatatctatgtttgattgaaaataattctaatgttacgtgaatactgcacctcaagtttatatgcttccaatggcttcggtgatgatttgtagttccattatggtttaaattttcgaagaatggaattgtaatattttctgaaaatttattctacagaaagaaattaattgggaatttacatattaaagaaagatttgttaattatgaaagtagccaaacctatatagttttgtatttctaaataatatgattaattgatataatgatgtgataaaattttattgaatgaaattattaattataaaacatatacggattcctcaaaggtgaatcattgcttattgtcaaactctaattttgttcgcattctaaaaagagaaaaaagaacaataacaaaaaaaaaggaaaagaaaacaatggctccaaaggaagagggacaaatctcgaataggtaaacagaccaatggggtcgtgacatttaacagtgttgtcaaataaggaagaggggtctctcaggtaatccctcattccttccctctcctttactctcccttcttctctccttcgctcctcctttcctctcctcttgtcttttattttttttgttatgtctttttggtttgtcgtttgttttgtttcatctcataggctagcaccttggttgtcggtgagatccatgagatccatagaggttgttgctattgtttgttgcgtatcattacatttcctttttagtttatcattaccttcctcatggtgttttcattttttttagctccgccattgtgccgccactatgtcgcaatgtcgtcgttgccccctcgtcgacctcacgctaccaggccctatgtcggtgtcgtcagggacccgtgcctcctccgtggttgtgcttctcccccttccccacgtcaatttgttgttgtagcttagggtttacaacccttctccttatttgtgggatgggacagatcgctctgacctcgttccaactctagcccaaaaaaaatcaaaacaaaaagtgggatggcaaacatgcttggtaaaaagaaaataaatagtactagttagacaccctgaatttcacacatacacccctttttcttttgggcctggcccgtttttgtttggtctgaaataaaataaatattgctagtcacaatcctcctttatatatacactccctttcattttgggcctagccaaaaagtctgaaataaaaataagtatttctccatgtacgaacccctatcatttaggctaatgaccaggctcgccacatcagcactttgtcagtgttgacttagtaaaagtcaaccctttgactttgatccttaaaaaaaaaagtaaattagtaggcaactctttgttttatttaatttttatgtttgtctttattatttattttattctttaatttggttgtctttttatacctaattagttagtttaattaataatgtgttataaatattccgctatttattttatttttctcacatttcaatctcacacccttaattactaagtatactcctcacttctattttatcccttcctattcttatttgatttatttgattatgtaactcttagttagtttttgatttatgggttttctttatgtaggtcaattattcatttattttttacaattatgcgttagtattcttttggtaagattatttgtagatgttttatactaaaaagtttaatgaaatccattcaaatcattcttaacaaacaatccaacaaaatttgtatattttttaataccaaaagacttttttttagttataaaaaaattctgattgaataccattagattttgttatcttcattaaaaaatcttaaaagtcttaatcaactatcacaaaacttatttatactattgaaaagtcctaattaaataccacaaaacttatttatataaaaaaaaatcttttaaaattctttgaaatcctaatctaataacccactaaactactaaattaaaatccacaaaagagcaaaaggatacacataaacatgttcacgatggtcataatcagttgtattgggtgaggaatctgccacagcctgatgagaggatatgtaatcttaggaatctaccacaaccctctgacctctgcagcaatctcaaggatggctggagttcaagaaatgcaatcgaccagccaactccattggggtttcagctaatgaacaaggttgtaacttgtacctatttcaaatctaggtttgcaagacacacttgtttttaaattgatcagccagctccattggggttccattgttgtttttttaaattgattttggtggcttgatataaccatcaagaaattgtaatttaaatttcgtaataaataatgacgatttttcagtcgtcaaaaattacattttgaaatagttaataatcatgttattatttaaccgatgacagcgattcaaaatataatttttaacttattagaatccaacacgaaaaaaaatacttattaaaaatccaaaataaaatttgataatatatcctacttgattcgctagcctactaagcgaaatactccctgactgacacgtgtcctaccccaaattcatcagggcaaaccacttaatttgctggttcatgtagcgagctacatgtccaatagggtgacgccacctcaacctaccaatttcgcccacgatgccaacaaattatgccacgtggtattctggcaaatattactataggcgtgacattctggataattttttttgcaaaagtgacactttgaccactgttctaattatgtacacatttttattttagtaaaaaagaaaaaaaaaggaagttacatattattttttctccaaaagtcacgtagtattttatgactttaataaaacattttaaaaaggaatcatatgtataattatgactttaataaaaataataattaagaaaatataaaataatgtaatcgtggttgtattcatgattttcgaaaaaataaaaataaaattaattgtctaagtaaaaatatgaatatatatgactttcattaaattctcgatttacactgtttgagagtaaaatctcaaactctactctttataattattaaaaaaagaaaaaagaaaagaagttgtatgcctttaataaaaaaaaaagttaaaataagttgtgagccttgttacgaattttaaggaaaaaaatattacaagagaaagtcatatactattttatgactttattttattaaataaacataaaattcatatatcataatatgattttattaaagaaatataacaatagaagaggtaaaaagatggaaggctatgtacgaatttaatcaaataaataaataaataagtcctaaataataaaaaataaataaaaaagaaaatctatatgtttacaaaattaataattttttaaaaaagtataaaaaagtatgatgtaattatatttacaactttcataaaaaatatgcaattgttataatgttgtaaattaataaaatttcaaaatttagtccattttagtcataattattcaaaaagattagcctcggtaggtaaaaagtcaatcttacgtcaaaagaaaaagtaatttgaaggaagcatttcgaggaaaataaaataaaagaagatggacactgtaactctataagttgcctcgtagacagaagcctcacattataaagtacagtgcacatttgacgaaaaacaactcgagtttatatgttttattaggaggaaaagaaaaaaaacaaaaaaaaaaagagaagataaaaagcaaactttaaattgtagaaaaaataaaagaaagaaaaagataaaaggaaaagagtatttaaaaaagaatctaattataaattaacacctaccaccactgtagttggtgatcagatcgactgaaaataaagagttgagtgaagtcaaatcttatccttttagtttatagcaaccgattccttacctttgcctttctactctgatcataagttgttcttgaaatcatggatgttgttgaagtggtaggtggtgcgttcctctctgcattctttcaaattgttttggacaagctagcttcaactgaggttgtcaacttggtccgtggaaagaagttgcttaagttgaagaccactctgatagtgattagtactgtgcttgatgatgctgagaagaaacaaagctctgatcccagggtcaattactggctcaatgatctcaaagatgttgtctattacgctgatgacttacttgatgaactttctaccaaagctgtcactcaaaagcaggtaagcaacttgttttctcacttttcaaattggaagatggctagtgagttaaaagacatagttcgcatgttagagaatcttttaaaacgcaaggagaatcttcatttgaaagagattgcagtggagcatgagcatgtgtcatggagagctccaacaatatctctagaagatgagcatgtgtcatggaaagctccaacaatatctctagaagatggatctcaaatatatggtagggataaagacaaggaggccataataaagttgatgttggaggatactagtgatggtaaagaagtgcctgtgatcctaattgtgggaatgggtgggattggaaaaactactttggcccaattagtgtacaatgatgacaatttgattcagatgtttgattttagagcatgggtttatgtttctaaagaatttgatattttgatgatcataaaaactgtgttggagacggttactcaaaagaaaagtaaattaaatgatctaaatttacttcaacttgatttgatggaagcgctgacaggtaaaagattcttaattgttttggatgatgtctggacaaaggaatatgttaattggagttttcttaaactatttcatcatgcggctagtggaagtaaaattcttgtaacaacacgcgatgagaatatagcatctaaagtcctcccagttcaagtttatcatctaacccaattgtcaaatgaagattgttggttggtgtttgcaaaacatgcatgtctttccacagaatccaatgagaatacaacaacactagaaagaattggcagggagattgtagaaaagtgtaatggattgcctttggcagcacaatcacttggaggtatgttgagaagaaaacatgacatcggggaatggaatgatatattaaataatggcctttggaaattttctggaagtgtgattccagcattggaaattagttaccattatctatctccacaattaaagcggtgctttgtttactgttcattgtatcctatagattatgcattttcgaaaaatgaattaatcttgttgtggatggctgagggtcttttaaatccccaaagaaatggaaagactttagaagaagttggtgacgactattttgatgatttgatttcgagatcattttttcaacattcaacaagttggcctcagcacaagtgttttgtgatgcacaatctcgtgcgtgatctggcaatatcccatggtggagaattctatttcagatcagaagaacttgggaaagatatggagattggtgtctacactcgtcatttttcatttaccaaatttggtgatctagtcttggacaactttaaagattttgacaaactaaaatttttgagaactttcttgccaatcaattttaaagatgctccattcaacaatgaaaatgtgccatgtatcataatgtcagagcttaagtacttgagagttttatcattttgtggcttccaaagtttaaatgctttgcctggtgcaataggtaaattgatccatttgcgttatttaaatctctcttacacatgtgtagaaacactaccagagtcattgtgtagtttgtacaatctacaaaccctgaagttgtctaattgcagaaagttgactatgttgcctagtggcatgcaaaatcttgtaaacttgcgccatcttagtattcatggtacttctataaaagagatgcctagaggaatgggaaaattaaacaatttacggcatttagattcctttattgtaggcaagcaccaagagaatgggatcagagaattgggaggacttttaaatcttcacggtccactttctattatccagttggaaaatgtcaccaaaagtgatgaagcattaaaggctagtataatggataaaaagcacattaacagtttatccttggaatggtctgaacctcacaacaatagtcttgacttccaaattgaagtagatgtactctgcaatttacaacctcaccaagacctggttttcctatcaataagtggttataaaggaaccagatttccagattgggtgggaaatttttcctactacaatatgacacatctaagcttatgtaactgtaacaactgttgcatgcttccttcacttgggcaactgccatctctcaaggacctctatatttcatgtttgaattcggtgaagattattggtgcaggtatatacaagacagaagattgttcttttgtgaaacctttttcctcccttgaatctctaactattcataacatgccttgttgggaggcgtggatttccttcgattttgatgcttttcctctacttaaggatcttgaaataggtcattgccccaatctaaggggagatttgccaaatcaccttccggctctggaatcactgacgattaaagattgcaagctgcttgtctcttctcttccaagggctcccgctctccgaagattaaagatacgtggaagcaagaaagtaaggctgcatgagtttcctattttgatggaatctttagaggtagaaggaagcccaatggtgaattccgtgatcaaggccatctcaaatattaaaccaagttgtctacaatctttaaaattgtcagattgttcatcagccttatcattttcagatggtggtttacctgcatcgctgaagagtctaaatatctggggtcttaagaagttggaattcccgacacaacacaaacatgaattgctagaatcacttgaaatacatgacagttgtgattcactcacatctcttccattgattatctttcctaaactcaaacgtctggtacttgtgaagtgtgaaaatatggaatctctcttggtttctctgtcagagtcatctaacaatctgagttcttttgagattcgtgactgtcccaactttgtttcattcccaagagaaggattgcctgcaccctatttgattcgtttcacagttgacaactgcgacaatttgaattcgttgcctgatcagatgagtactcttctcccaaagttacgttatcttcacatagagaactgctcggaaattgagtcgtttcctgaagggggtatgccacctaatttgacattagtagggattgccgattgtgagaaacaactgagaagcatagcatggccatccatggacatgcttacctctctctacgtccagggtccatgttatggaatcaagtccttcccaaaggagggtttgctgcctccctctcttaaatctctgcatctatttgacttttcaaatctggaaacattaaactgcgaggggcttatccatctcacatcccttcaagaattagaaattaatagttgtcaaaagctggagaacatggcaggagaaaggcttcctgcctctctaataaaattaagcatacatgaatgccctatgctgcaagatcgatgccacatgaagcacaaacaaatttggcctaaaatttcccatattcatggcattgatgttggcaggaggagatagtgatcgagcatgatcaccaggtaattctcctgctttaacctacttcatcatctaagtctaaccaaggttcagtcaaggatatgtttcatttcatgtctttcttcgtttatgtttaacttagttattggcttattgcatacaagaagttttagatcagttgctcagcatgatacttgagtggaattggaagtgtaaaccacagcaaattcatttgtttatactttctttacagtgaacattcatgtacttattaatcaaatctgggttctatactttcttgtatgaaagtgtaaaccaagaagaaataaggaatatttaattttccaatcaatccaataataacataatattcataatatagcacctgaagttccctttcattttttgatttgcaaaggatcgaaaacagaaaataactatgaaattaagggtagattatgtatgtagttgagatattgaaactttcggctcacattttactgatgtctcttgtggacaatttagttaatccaattgattttgaaataaaaattaatgcagtatatatgttactgaactacagcgaagcagcacattatcatagccaacatatgggatcgtccaaattgaattgagtgaagaatgttacttatggtcctttagattcaaagaaataactacaggtattagctatgcaacattgataaatccttcagcactcactgaaaaaatgttgctcattaatgtcattgtaggttaactttctcaatatatcagcactcactggtggctgtttcttcatattgcattgtctgtcaatgttgaaagtgtaattggttgtgtactttggttaatatacatgctattattcagttgattgaggtcggggtgaaattcacgagcctggaaaacttatttttgttttttgatttaatcaatgttacagtgaaactttctcaataggtgattttttaattggaaggcttttcattgggtacaatgtgaaggatagaaaggtgtaccaggccagctacatagaatggtctcaagcttcccagttatatactgacaataattgaaaaatactgcataccctttaactgctagccaattcaaattctctgcaacaacatatatgaggttttgccttttccattaatattgtgttttgtgttgtaggaaattgtaatatactgctcttgtgagcaagtcatcacttatgtggtacaatcttcattatatggagagtgtccccaagtagttttgattccaaacaagaacccaggaagtttgatggatgggtgatggctaatgggtaaggtctttgatctttagcattttaattggactaccaaatagcatatgtaatatgtttatggaagtcaaatacatttcatggtgaaactccactacaatagcccatgtttaatttattcacgaccatgatttttttccccatagtattgaaattccataactttcatatttctttctttctttctcaggatacacaacttctaatcaactggacatttcaacattaattttacaatttaattgtagcaaaataataggcattaagcaatgttctcatatatgacttggcaaatatccataatttaccacttattcttaaaacatttataaaacattctttatattttgtttgtgtttgcaggatggggccagaatttcatatatatggaatgtctccgtcctgcttcaattgagaaatagtcaatgtattgatgctttaacacagttttttcatagttgaatacaatcagattgctgcaataaaacaagacatctctgctcattgtctttttcacaaaatttattgtcaaaaacttctcttgctattattcaccaagatgtagttcacaacgtttcaaccacttgctagagatgctttttaacatgacctttcaagaaaattgcattagtatgcatagttaaacatataatatatcgtggaaattatattatcagaaaaacctttgagcaaaacattcatagctcatctgtttatgtgtgtaaagctgatcttcctaggaaaaataaggattaagcgaggacaaggtctgaagatgacagagtcctttggatgagaagagaggagaaaaatgaaaaactcaataggataagattgatccatggtatttcctggagcatataacaccgtcaactccctgacagtacaagccataaggcatacttggccgattgggataggtaataactattaaattctccaacataaagctactttttctatgaggattcatataaaattgataaggatttggatcttcctttaaataccagagattcatgaacgaacttatcaattgcacctttgatttgaaataacaaaatataggtgtctaattataattcctgtctagtatgaatagaagaattgccaaaatatagcttaaacatgatttttttttttaaataagacaatgtttttttcttaatcttatattttattgttcctcccatgcctaacatcaattttgtaacctatgtggaacgaatatagcaaaaatagacaatgattagaaaataaaggattgtgctgtttgagaaggggagtcctaatttcattcttagaatccatcaagcttatcattctttatgctgaattgggaaattggctttgttcttactcattgttatttcttaatttcctttgtattttgctcagagttttgtgttttattaatttgaaagggagatagcatgtgtatacatatcctatgggttgtatgtttggttagcttacaagcttcagaatgaagctagatcctgaattagaatgtccgtatcctaatctcttttaaattttgagctgatactgcaatgagggctttgtttgtttaaagttgtgtatgtcaatggagcgtaagcttcacgcttttaacaaacttttgtgttttctgtttctttgactttaagaaaaatttgggtatgtcacttcctatactccttatgtggggaatactgccaattgactgtccttaattcgaaagagaaactttgaattactgcatttgctatggttgtttacatattttcatcagttgctcatgtcaatgcatgaaatgattgctctcagggctttgttcaaattgacaaggatgatcccaaactacttctggttacatctatcggacctgtcattcaggtatgctgacacaagtgaaaaaatgttgccttgcctttaactagtgcttgttatttctctgcaactacacatttgaatctatataactttttgctgaatattgtggtgcaggaaactataagttactatgctctggagcccctaatgtgtatagggagtgaattccataacaatgtactggttgctcaactcttgacaccaattttcaacgcgagataatttataggttatttgtaattatatgcacgttttattagaataatatttattagaatctaatttatagccatatatcatcatatcatgtataattatttgtatttatagcattcaacctgtacaaaacggactttgttgtgtaatttagacacacgatttcagactctcgtgcctttttttttctccttcaaaaattaactattcaatttccccaattcagaaagtgaagcgagataaatttatcattaaactaatttctaaagcaataatgtattttacgtttgttggtgacctcccaagaataaaatcttcctaatcaatgaaattagtatcctttgctggataatggatattataagtttgcttgacatatgacaacaaatatcaaattggtctttataaacttttgaatgaggtggcaaaattgaaaagaatgacaaagataccttactccaccctattaaacagtaagggtaatgacggaaattaaccatgtttcctttaagtacaatgctaaattaaaacatgaaaactccatctcttcttggttttgacattcctgaccaatgattttttacttttcctgctacatccacaagagcacgaatgaaagaccccacctaaatcttccacatcgctataagaaagtgctgaccagtgtaatataagtttctcttctcaatttattaaggttaattttgacaagaaaaaggaatttgcaaagtgaagttgtgaaagttattgaaaagaaataaaagataattttactgtgtctctcttagatattcttagacatgttttctttctaaaaaaagtaaaatgaagaacacaaaaaagtttaaagacaagttttaaaaggtttctatatcatcataagtaaaagaagtcattgaaaagagaaacattagtaatattttctgaacaataatatagatccgaataagtgttttaaactttttcatagaaattacaaattataataaatgtgagaaatatgatatccaaaattttctagtgtaatttcatgtatgacaaactctaaaaaattggacactaaaataaaattattgcaacaattggtatgagaacaagttttggatatcattttcttcgttagagattcttttaactcctttttattttcttgcggaacgtgtaatatactggaatgtatatgaattcgctgggggagcatttaaaaaaaataaaaacacactgccattctttattattagaagatgcaaatgctttaattggccgaaatggttatgaaggcctgcacgtgaaaatgtatatatctatgtttgattgaaaataattctaatgttacgtgaatactgcacctcaagtttatatgcttccaatggcttcggtgatgatttgtagttccattatggtttaaatttcgaagaatggaattgtaatattttctgaaaatttattctacagaaagaaattaatttggaattataaattaaagaaagatttgttaattatgaaagtggtcaaacctatatagttttgtatttataaattatatgattaattgatataatcatgtgataaaattttttgtttggattgaatgaaattattaattatataatatatatatggattcctcaaaagtgaatcattccttattgataaactctaatttcgtccgcattctaaaaaaagaaaaaagaacaataacaaaaaaagaaaaagaaaaagaaaacaaagactccaaaggaagagggacttgcaataattatgcaaaataagagcgacacaaatctcgaagagacaaacagaccaacagggtcgcgacatttagcaatgttgccagagaaggaagagggatatctcaggtaacccctcattccttccctctcctttactctcccttcttctctccttcgctcttcctctcctctcctcttctcttttattttttttttcattatttctttttgatctgtcgtttgttttgtttcatcttgcaggctagcacctttcggtgagatccgtagaggttgttgctattgtttgttgcgtatcattacatttcatttttagtttatcaccaccttccttatggtgttttcatttttttaactctgccattgtgtcgcaatgtcatcgttgcccacccatcggcctcgcgctaccaggccctgtgtcgatgtcgttagggagtcgtgcctcctccgtggttgtgcttctcccccttccccacgccgatttgttgttgtagcttagggttttgcaacccttctccttatttgcgggatggggcaatcgctctgacttggttccaactctagcccaaaaataaaaatcaaaacaaaacgttgggatggtagacatgcttcgtaaaaagaaaataaataatactagttagacaccctgaatttcacacatacacccccttttcttttgggcctaacccgtttttgtttgggctgaaataaaataaatattgctagtcacaatcctcctttattgttgcggattcgacaagtataccgatcgttgcaagtaatataatgatacgaaagtgtatcgttcccacgaggattgtttgaccaattaaattacaaattgtatcgataggttggaggacaaataattttgagaaattgttgttgtgtgtgtgtaacaattaaattaaaagctaactattaacataaagcttttataaacaagtaagtaaatattgtaacgatgtgtgatgatagtagttaaggcaacccgcactctgtaataccttgaattttaatcatgtgtttaagcttagattaagcatgaatctaagtttatgggctaagggaatatgatcatgcttaagagtcctttggaaaatgcaagttttgggttatctggcctgcggcgcgacccacttggggtacggcgcgacacgcgccatatgtgtaaaatagggcagatggctctgccatgccacgcgagtcacttggaattcacgcgagtcgcgtggaaggcccgaaagagtggcgcgagtcgcgtggagaagtggcgcgagatgcgtgggatcgacgttttgcttttataaatgcccctagggctgaaagagaaaggagaaagaagagagcgagagagagaacctccattgatgaacgttagagcttcatatcttctccatcgttcatctaaacacctccgaaccaactgagaaaatgatcagaacctcgagataagtgagattccccgattgatcttcgagaatagctgagaaatagtgagattggatttccctgagagaacctttgggagctcggagtttgaaggcgaaagagtccgtgattgagcgagctaccttagggaaaactattccctggtgcttctgagcatcacagaggtaagaaactcgagctctaaccgttgattcggtgttttggattcaggggtttggggtaatcttgaggggtgtttttggaggtgttagagccgttattaggctcggactctgtagagtcttatgctcaggaaggtattctgaggaagttagagccttgaatcatcattagtgatgaagtttgattttggctctgagtctgtatatgcagatggaaaaggttgactatttgactagtctggaccttagagcaattgacaaagttgctcatgagacggtataggtgagtttgatcggttgaaattgatcattatgagaagttggatttaggccattgtaagcagagctatgcttggccatagttgatcagagcttgtgtggaggctctgtagccttgtataggctaagagggatcctgttgagggtcagatgatcacttagacagtgattatgttgtggttatggaaaggaagagagtttcctttcgtttgaacggtttagaaccgtatttgatgagttatatctttgttcttatgtaggacgtgagcctgatagctcaggtggtgttgaccacggggccgggagagccggtgacttgtctagagcaggtaagctcttggttcttgcttgtgattcctttactgtgttccaccacactcctaagggggtgatggttctgatgtgattttatgcctatgtggttgattgattattggcctgaatggctgatgagtgataattgtgccctatgagtgggtaatgactttgatttgatctatgatgcttgtcgttgatctggacccagtgatgggcgattatggtgcatagctatgattgtttagcttgagatatgcacgattgattgtgaaatcctatggtaataggatagatgacatgtgattgagacaggcctgacatgagatgttttctgtgatataaagatagcctccttagtgagatgaccctatattcacggataaagcctcctcaggcgaattgtattgagatatgagttgtagctcatgatagaggtcggcccggtatataggagtcctccagacgtggttgtacctatatattttcagaggtgcctctgatacgtcctgccatgagatgttctagtatatattggatcctctgtgagttggatcagcatatatacctagatgaaagcctccgcaggatgatgatagatagtgacgtcctgccatgagatatcctagtatatattggatcctctgtgagttggatcggcatatatgtctaggtgaaagcctccgcaggatgatgataggtgatagatggtgattaccatcggaatcacgtggatattgacagatggttgtacattgattgtttacgtgttgattagatgaattgttgattataaccatgatgatgatgatgtttctgtctgtgtatctgttgtcagtgaaccaggggaaggaaataccttcaagggccctgagtttactgagattttatatctcaccccttgtgtggggctatgttttgcaggtgattcgtccagagcagcagagagatcccaaggcaagaagcctatgcaggattagctgctggtggataccttaggatagaggacttgagcatgttgctcatatgctctgatttttgttttggttatgtactttgatgtaccctgatgggatatttgtacagttttgtattgtacagtggaactttgatgtatattcaccatattatgatgtacagtgttatgatagtgactttgatgatgtcacttctagtgtatgcttccaaactgcttaaactctgattgattaactgcttttattgtgatgtgtggttagtaatgaccctgattagtaaattgggggcgttacacactcaatgttccttccaatgaatttatattgtttactacacccaaatatctaagttattcaatggttgtgtttatcatatattaactacttaccaattcctcagtgacatagctctttaacccaatagcaagccataatcccttagtaactttcttagggttaagcattaagtaaacacatggataagctacaagcatgcatccctattcctaggtgatgtaaagcaagtcaccacacttagttccaagactaaagccccaattaagccttcaactccccaaaaccctagctaaggtgcccaagctcctaaaaccctatttttgtgcttttctccctccaaaaaatcgtgcattcaatgctgagggtttagtatttataacccagcttgtgaagtccctgttttgcccttgacagctttaattatgcagcttctgtcgacctgtggcgctgatggcaccaactcacagaacgaatggcgccattggcgccaacttggcgctcctgacgctaaccaacagagataatggcgctctgggcaccatactggcactgacggcgtcaggtaccaaaactgatggcgccaatggcgcggctttggcgtgaacaacgccaatctccagtgttcttggcgctggtggcaccattcttggcgctggttgcgccaaacttttcttccaagcttggttcttcttctgattctttgtttaaaattgctatctttaattgattcccggccattacaaaatcagcataaatctcaacacaaaatgggcaattatcaatgcttaatgctctatttcttgcttctaaaagcttaggaaccttatatgctaggcgcatatcaaacaattcccagatttagatattgatgtccttagcaataaataaagtttcaagcaggaagcatggattaattctctagaacaacattgaacaaaacaatccttgagcttagaatgctacaaacaactgaaccaattcaaaacttcaaacaaagattttcaaatccatcaaacattgaagtctaacttgaatatccctcactaaggcaattattcactcatcactcaagtgtctgggtattataatctctcaatccaccacagctctagcactactataggcttgatcctattctctaattcctaaaaataagaaacataaacacatgcaaagttgatcaaaaggtcttgataaggttgtaacttggcttggctcaatgggtaggagtattttggacagtgactaagaattattgagattggaccctgctaaattcagatacattcagatcaaaattagggttttcattccattacttcctttttatcattttcttttcttttcttctttttcttaacattgcattttctttctgttcatttgttggcttcacttgaagaccattctttacttttcagcccttaagtttctaatggaattcaccttgatttttttatatgcttttttttctgaaccacttagctatccaatctcacttaaggtagaagaattaatgtggttaatgtattgtatcatgtgattgaacaaaaaggtctcaagctcaaggggctagcaatggtaatatttcaaggaagtctatttggcccaaacttaatagaacaaaatgcctttatcacatcaacttatgcatgcatcagagagaaacagatcaagttctagcgtactatcacagtgaggcatccctcaaaagaaatcaactgtataagcacaattctcactggctatggtatcaagctagactcatgatgatatcagatcaaacattgttttccatttcaaattgaattcagccatgcaagcattcacactcagttcatattccatacaacatcatatcatgattcatgtcaccaatgctttccaaaatccaattcacaactgactgatcgagcaaatctaaatccatgacaagcatgcttttagcaaaagtgtctaacatgtacacctatggttaggttagaattagacgcaaaaccaattgtagttactatctgtatagcttcacaaaaagaaatttttgtcacaaaatgtatctgaccaaaaagtatctgcctactgttcatgtttcaccaaaataaacgtttcaccaaaaagatgcatgattaataataagaattgtatgactaacgcgtgtttcctcgattaacgtgcccatattcccagatttaaacagttgctgtccccagcaaatgacacgcataaaaacacaaagcagatgacacgttattagaggaaacatactcatgcataaacaaaatatcaaagcatgtcagaaatgtcatatgttcaggcacgcactgacggtgccacacagtgtgcaaatgtctaagatagcggaatggaaagtgcagaaaacgaaaaggacaggaaaataaagcataaagtaaacaaagatagagagcgaggaagatcagtgaggctgatcctcatccatggtgtcggtgccggctgtgggagatgatgatggtgaatgttgcctcgctagtgatggaagtgcaaaagagagtggaggaggttgtggcggaaagctgtgggggtcaacagagaaatgctggcaaagtgcggtaagcatccgggtctggtcgtcaatctactcctgcatcctctgagtggtagtagtctggtgttcgagttgctgctggatcctcttagtgatggtggtcagatggtctatctgctactgcatcctcaaataagtagcggagtcctcaaagatggactcacggtggggggcctggctggatgcagtagtggcttcctgccgtggtggcggtgattatgcggctggctgtggtgatactgctggctgggggaaaactggtacctcagtcatgggctcctctaacccgtcacggggtccatacctcgggcttctggcagccatctcctcaggggtgaggtcggaagcacgaatgagctgctcttgaagagcgtgcttcaccgagttgaggtaggtccgcagggtcatggtagtccctaccttcacatccatgggctcctcatcgggaatctctaagcctgcgtgcatgcagaggtgagaaatgagggaggaatggtctaagagagagcggatgttgccgtcctggatcatatgcaggatccgatctgagagaacatatgagatgtcaaggttaatctctctctgcaggacgtatagaaggcaggcacgctcgactttcacatccgtcaagttagaggatggaagcatggtggagttcacgaacaagtgccagaaatctgactcagtatgcagctcgtttcttcagtatgcagctcgtttcttctgaacaagttagaggatggaagcatggtggagttcacaaatgggtccgtaagtgccgcgcgggtcgcgccattcccacgccaatagcgtggaaccccagaactatggcgttggtggcgccacgttcacacccatagcgcggcaatctagtgaagttggagctttaagcgccaaagccacgctgatggcgccacaccttggaactccagacagcgccactggcgctaggttcacgccactcgcgtggaagtccaaaaatcgtggtgcggatggcaccacaactgcactggtagcgcgggaatcctgagagtttggcgctggtggcgccatccccacgctggtggcgccatgacattgattgaatttccagccagcgctggtagcgccataatgacgctaacagcgtggaattccagagaccatggcgcctatggtgccaagctcacgccaatggcgccatactttcaatgaaaaatgcagctagcgcgaatggtgccaagctggcgccataagcttaacataggcacaaaacaacaggaattgacccttgaagatctaaaaacactaaaatccttaattaatgcaaaataagaactaaattactatgcattgatgaaaacataaacaacaacaacaagcatagacgaattgaattctttgaagcacatgacaactaaaacaaggaacacaaagccaataatctaatctaccctaagaaaaagactcaaacctatgacattaagcacacgattgagttgcctctcagtaagcacttgtttaacgttgcgagcctgacggttaatcctcaaggattaggggagctcaaagggattgcaacagcatccctatcaatcttaccaccaaaatatggcttcaaccaccatccattgaccttaaatggtctgttggtgtcaaggggagagatttctattgttccataaggaaaaacccttacaaccacgaatggtccataccatctagatttgagtttacctggaaacaaccgcaagcgcgagttgtacaataatacctgttgtccgggtgtaaactccttgggatggatctgcttgtcatgccatctcttgattttctccttgtaaagcctagcattctcataggcggcaagtctgaattcatctaattcattaagctgcaacaaacgcttctccatagcttttgatagctcaaagttgaggaacttggtggcccacatagctttgtgttccaactcaaccggaagatgacaagatttcccatacaccaactgatatggtgacatacctatcagtgttttaaaagctgtccgatacgcccacaatgcatcatccaatttcttggaccagtccttcctagaacttccaacagcttctcaagtatcctcttcaattctctgttagaaacttctacttgactgctagtttgtgggtgataaggcgtggccaccttgtgagttaccccatacattgtgagcaaactttcaatttgtttattgcagaaatgtgtgccacaatcactgattatggctctggggaccccaaaacgagtgaagatgttctttctcaagaaatttgcaaccactctatcatcattagtgggcaatgccaatgcttccacccatttggagacgtagtcaactgccaccaagatatattgattagagaaagacttgggaaagggtcccatgaagtctattccccaaacatcaaacaattcaacctccaaaatgttgttgagtggcatttcatctctacgggatatgttacccgttcttttggcacctatcacaattttctacaaatgccttagcatctttaaataaagtgggccaataatatccactctgcagaaccttgtgagcagttcggttgcctccaaaatgtcctccataacttgaagcatggcaatgccagaggatctttggaacatcaaactcagctacacatctcttgataatgccatcagcacattggaaatacagaaatgggttgtcccactggtatcttcgggcatcatgcaagaacttcttcctttgttgccaagtgaagtcctcagggactgctccaacaactttataattagccatatccacaaaccaaggagcattggtgacaaccatcatctgctcatctggaaatgactcattgattgctagttctggcccatcttgcagatttgtagcttgaatcctcgacaagtggtctgctactttgttttccaccccaaccttgtctcttatctctaaatcaaactcttgaaacaagagcatccaacgcagtaggcatggcttagcatcctgcttggtcaataaatacttaagagcagtgtggtcagtgaaaacaattactttggaaccaatcaagtaaggtctaaatttatctaatgcatatactacagctagcatttctttttcagttgtggcatagttaatatgtgcctcattcaaaacttagctagcataatatataacatgtagaagtttatccttacgttgaccaaggacaaccccaatagcataagcacttgcatcgcacattagttcaaagggcaagttccagtcaggggctgttaagactggtgcagttgtaagcttttccttcaacacattaaatgcattgaggcaagcttcatcaaagacaaaatcagattcttttgttaacagttggctaagaggtcttgcaattttggaaaaatccttaatgaacctcctataaaagccagctaggcccaaaaatctacgcacaatgttaacatttgtgggaggaggcactttttcaatcaacataagcttggcctcatctacttcaattccttttgaagagattttatggcccaaaacaatgccatcgcgtaccatgaaatggcacttctcccagtttaaaacaaggttggtttcttggcatctttgcaaaactttagacaaattagataaacaggcatcaaaacaagaaccaaacacagaaaaatcgtccataaacacctctaaaaaattttcaaccatatcagaaaagatggatagcatacaccatcatttagtcttctataatctacgcacatccgccaaccagtgatggttcaagtaggtatcagatcgttgttatcattctgaaccacggtcactccacccttcttcggaactgtctgcaccgggctcacccaagcggtgtctgatatgggatagatcatccctacatcaagaagcttcaccacttctttccggaccacttccttcatcatcggattaagccttctttgtggttgcctcactggcttcacatcatcctccattagaatcttatgggtgcaaaatgaaggattaatacccttcgaatctgagataaaccatccaatggttgacttatgctccttgagcacctttattagcttagcttcttcatccccagataagcctttgttaatgatgacggggtatgtcttatcttcccccaaaaacacatttgagggctgctggcagctccttcaattccagctttggtgccccaagatcaattgtaacgccccagctacaaccgaggtcattaccacgccttaattactatcattaacattaatcatcagagttaagcagttcggaagcataagaataaagaggacatcatcaaatgtcactatcataaacttatatacatcaaaatatggtgaatatacgtacatctgtgtcttttacaaaactgatactgtaacgccccgatttactaatcagggtcattaccaaccacaattcacaatcaagcagataatcaatcagagtttaagcagtttggaagcatatactagaagtgacatcatcaaatgtcacctgtataacactgtacactataatatggtgaatatacatcaaatgttccactgtacaattcaaaactatacaatatcccctcagggtacatcaaaatacataaaaccaaaacgaaatacaaaacatctgagctacaagctcatatcctctagcctaaggtgaccatcagcagctaatcctgcataggcttcttgccttgggatctatctgctactccagaggaatcacctgcatcataagtcccacaaacggggtgagatataaaatctcagtaaactcagggcccttgaaggtatttccttcccctggttcactgacaacagatacacagacagaaacatcataaacatcatgattaacatcaacaattcattcaatcaacacataagcagtcaatgtacaactatctgtcaatatccacgtgattccgatggtaatcaccatctatcacctatcatcatcctgtggaggctttcatctagatatatatgccgatcccccactcacagaggatccaatatatactaggacatctcatggcaagacatcactatctatcagaggcacctccgaaaatatataggtacaaccacgtctggaggactcctatataccgggccgacctctatcatgagctacatctcatatctcaatacaattcacctgaggaggctacatctgtgaatataggaacatctcactaaggaggctacctctataccacaggaaacatctcatgtcaggcctatctcaatcacatgtcatctatcctattaccataggatttcacaatcaatcgtgcatatctcaagctaaacaatcatagctatgcaccataatcgcccatctctgggtccagatcaaatgacaagcatcacagatcaaatcacagtcattacccactcatagggcacaatcatcactcatcagccattcagaccaataatcaagcaaccacataggcatgaaagcaccacagaaccatcacccccttaggagtgtggtggaacacagcaaaggaattacaagcaagaaccaagagcttacctgctctagacaagtcaccggctctcccggtcccgtggtcaacaccacctgagctatcaggctcacgtcctacataaaacaagcatatatcacatcaattacggttctaaaccgttcaaacgaaaggaaactctcattctttctataacaaaactcaatcactgtataagtgatcatctgaccctcaacaggatccctctcagcctatacaaggctacagagcctccaccaagactctgatcaagttatggtcaagcatattcctgcttgaacccaacctctcataatcatcaatttcaacacacaaacagcatctacgccgtctcatgaacaactttgtcaactgtcctaaggttcatactagtcatataactagccttttatctctgctcatactgactcaaagccaaaatcaaacttcattagtaatgatgattcaaggctctaacttcctcataacagtcctttgagcataagactctacagagtccgagcctaataacgactctaacacctccaaaaacacccctcaggataaccccaaaacccctgaatcaaaacacagaatcaacggttagagctcaagtttcttacctctgtgatgttcagaaacaccaggaaatcgctttccctaagataactcgctcaatcaaggcttccttcgcctttaaactccgagctctcaaggttctctcagggaaatcaaatctcactgtttctcagctattctcaaggatcaatcggggtatttctctcctctcggggccctgatcactttctcagttgggtcggaggtgtttaggtgaacgatggggaagatgtgaagctccctggttcatcaatggcttcttctctctctttttcctctccattctcgtcccaaatgaagctcttatataagttgcccgaaggccccgcgcggatcgctccacctccggcgctgaccgcgccaacgggcatcaaccgcgccaactgcgccaccattggcgccaaccgcgtgaaaaaccagagaaatctgtatttccagggcacttaccgcgcgacccgcgcggcaaatggcgctatccgcgcctctcacattctcatagcgccaacagcgcgatttatggcgctgaccgcgccacgccttgcacagcttatttctttcctttctcaagccttttctctaattatactaagcctaatcattatccttaatcatggcttaatctaggcttaattacgtgcttaagattcaagacattacatatacaaataacatcttccctcaggtacacaacaaaaccaaaggtagatacaaaatggtagatacaaaatagtagagccacatgctcatatcatctagcctaaggtgtgcaaatcaaagctatccctgtataggcttcttgccttgggatctatcggcttctcctgaggaatcacctgcaaaacataagccccacacacagggtgagatataaatctcagtaaactcagggtccttgaaggtatttccttcccctggttcactgacaacagatacacagcacataaatatcaatatcaaggaataattccatacacatccatcagccaaaaccaagatatagtcttggcatacagccattcatcacatcaatactgttatgcagaggctacatcatagtatataggaacatctcctcacagggaggctacctctatatactaggcacatctcctgcatgtatccctagcggaggcttcctctaaatatataggtacatctctatctcgaggcttcatctatatatcaggtacatctccttttgggtgaggctacctctgtgaacataggtacatctcttatcacgaggctacctctatgtattacagggccatctcatcctctaacataatacaattgcctggggaggctacctctgtgtatatgggaacatctccacgtaggaggctacctccatatcacaggctcatctctcaccaggtctttctcaatctcaatcatctatcctactacaataggatactattaatccaattctcagaattccaagttcgtctaatggttaatcacgcctatcacaggctaaatggctcacaaccacatcaattaacctcatatcacaacatttatattcattacatatcattccctcttcaaagggttcacatatcattccctctacaaagggttcagcattcaatccaagcatatacaatcattacatgttatcccctcatcaaaggtttcagtccacattcaatgtagaatcatccctcatcaaagggctcaattcacattcaacatataatataccctcatcaaagggttcaattcacagctcaagcaggtacaatcaatacatacattccctcatcaaagggttctatttacatttacagcatatcaaggcaatacattatatatacatcatttcctcactaaaggattccattcacattcacactcatgctccacatacatacaattattcacatcaagaccatccctcccttgagagtatggtggaacacagcaaaggacatacaacaaggtccaagagcttacctgctctaagcaaagcaccggcttccccggtctcgtggctaccaccaccaacggtatcagactcacgtcctacataggcaaacacacacaacgtataagcaacggtcctacgctgttataacgaaaggaactacaatccctttctacagacacataatcaatcacttcacaagtgattcacggatcctcactaggatcccactcggcctaaccaaggccccagagcccctcctaagactctgctcaggctaatacaaagcacatccatgccttagccctaccatgtccaagctcaatcatacaacccaaaatcagctcatggacaacatctaaaacatctcaagagtactttatcatctactctagggttcaacataaccatgcactcagcccctttctctatacatgcatgtctcagagccaatatcaaacttcataaataatgatttctgaaggctctaacatcatcacaacaaccccctgaacacaagtctctacaggactttgggctaattccaaccccattacaaaagggtcactattcatgcaaacccccaatctcaaaatcaaacggagaaacttgagtttcttacctcaacggcgtccaagacgaccctaggaccacctcctcgagctccggtgtcctttccacgcaatgggtctcagccacactcaagttctctaagctttctcttggggatttcaaaattcactcaaaaggggtttttttttttatggaaaaggatgagtgattcaagcttccatagtgtttctctcacaattaaaagccaaaggaaagtgttttggtgcagaaatatggctcaaggaagcttgggatggtcatcaatggagtctagggcagaaggaagaagaagaaggcatttttctcctctttttcgcgtttttgggctttaaatagtcactcagcccgacccgcggcgcccttggcgccggcccggcgctcccagcgctgtgctccagaaactccggcgccatcagcgccacatctggcgctctcagcgccacgttccagaacctctggcgcgatccgcgccgcacctggcaccacccgcgccagctagaaacttggcgcccctgacgccacacatggcgcccatggcgtgaaccttcagtgaccccgcactcccagcgtgaacctggcacccttggcgccaccttccagacaccctggcgccaccagcgccacgtctggcgctctcctcgccacctgggaagcttggcgccccaggcgccacctctggagctcctggcgccacttcccagagaccatggcgccctcagcgtggacctggtgctcttggcgccacactccagtgctctggcgccatcagcgccagacctggcgccctcagggccgcaacccttacagggttttctgctaactgcaccattttggatcattgaaacatgattatagccttaatcctagggttaattacatgcttaagattcaaggtattacatcaatatcagtgtccttctccaaaacctccatagctgtctccactacttcttgggacatgatggaatcttatgtctctaattcttcttcttctattccctcgaccagaacttcttcagcttggatacattcatccaatacatcaatacgaaaacaatcattccgatcaaaagggttcttcatcacatcaaacacattaaagaccactgactcatcatccattcttaactccagctttcccttctccacatcaattaaggcacgggctgtggctaagaatagtctacccaacaagagaggtatatcactctcttcagccatgtccaaaacaatgaagtcggctggaaagatgaacttgtcaaccttgacaagaacatcctccaagactccactaggctttctcaaagacctatcggataactgaagggataccatagtaggctttagctcagatatgcccaaggatttgcacacagtcaagggcattaagttgatgctagcaccaagatcacagagagctctccccacattaaaatttccaatggcaattgggatgttaaagcttccaggatcacgaagcttgggaggcatcttcctctaaataatggcactgcactcctctataagaaccaccgtgtcacattcctgcagcagcttgtgcttcttggaaagaatatctttcatgaacttggcatagttaggcatgtttgttaaggcttcagcaaaggggatgttcacttgcagctttttgaatatctctaagaacttagcaaactgctgcttctgaaccttctgctttgttttcaaggggtagggaggtttctcgaatttagaaaaattcataggctgcttcaagtcatcagggaccttctccttccccttttccttctcttttgagctactggaagcttcttctacttcaggttcctcctttattaccagctcttccttttcctcctctcttgagaccactttggatttctctttaggggcaatcactatcccacttctggtggttatggccttagcatgttccctaggatttacaaccgtatcactcggaaattggcctggcggtctctcagctagttgcttggaaaatttggccaatttgaacttccagattcctgatggatgcgccttggttcttcaactgagaccttgtctcattcataaatgcatcagtattctggatgtggtcatttgtggtcttggccagctgcagcatagccttctctaattcagatggctccttgcgagggatgggaggtggttgcaaataatggttagacttgtagtctaacccacctctttgaggtcttcttgggtaactactcctagaagcttgattataatttctctgataaccttgtggaggcctctgatcataccatactccattaacttgaatcggatcagcccccaccaaggtaggacaaacattggactcatggtccccttggcaatattcacagacaaccacgcctgctttaattgaagaagcttgagcttttgagatttccagcttgtcaattttagcattgaggatggctagctgctgtgataaaagtttttgctcagccaacatagcatcaacgctgcccagatgaatgacttccctcttaggctgagttgcaacactctcatttttagtacgggccaaagagttgatcaaattgtgagtttgggctgcagttttttatcttatggagcctccgactgctccatttactaccagcttagactccggtgtcaacccattgaagaagatgcgcaccttcttcccaactggcatgtcgtattgaggacatcgccggatcagctcttggaatctattccatgccgcgcataatgtttctccttggagttgagtgaagttggtgatcgcattcaccaattggttgtatttttgcatggataaatattgggcgaagaactttgccatcagctcatcccaagtagttatattgtttgaagcttggcggcccaaccacctgagagctttccctttcaaggcaaaaggcaaaagcctcatcctaatagcatcgtccgacactccatgatggtggatggtgtcacaaatcatcataaatctatcagcaaagccatgaggatcctcatcgtcctcaccaccaaattgactctgttccaccaagcttattagagaggggtggatgtcgaagctatttgcttgaatgggtggtctgactatgcttgatgcaggccggacgaacataggagcaaggatgtcctccatgagttcatcctcaggtcttggctgctccctattcctttcagccatatctagttcttcttctagttcttcttcttcttcttgtggtctagaactagatacttgtgcttcattcctttgtctccttaacctctggttcctctttgccattttctcgatcttaggatcaaactgtagattcacggggtcagcggtaccttgcataaactctggaagcaggtcaataacaaaataaatccaaccttaaagataaaaagttataataaaattggctaaaacaatccccggcaacggcgccaaaagcttgttgcggattcggcaagtatactgatcgttccaagtaatataatgataagaaagtgtatcgttcccacgaggattgtttgaccaattaaattacaaattgtatcgataggttggaggacaaataattttgagaaattgttgttgtgtgtgtgtaacaattaaattaaaagctaactgttaacataaagcttttataaacaagtaatattgtaacgatgtgtgacgatagtagttaaggcaactagcactcaatgttccttccaatgaatttatattgtttactacacctaaatatctaagttattcaacggttgtgtttatcatatattaactacttaccaattcctcagtgacatagctctttaacctaatagcaagccataatcccttagtaactttcttagggttaagcattaagtaaacacatggataagctacaagcatgcatccctattcccaggtgatataaagcaagtcaccacacttagatccaagactaaagccccaatattcttattgtgaatcctagctctgagctctcaactagattgatcaagtctaagaaagagatgtagatattcaagcaaagtgcagtaaaataactcttgataaatgaataatagcattcaatacatcccaatggaagttacatcaagtgcttggccctaactacaatataaaatcagccaaacctcattgtggttggctgtgatacaaaaaatggcatacccagctgaagtgcaaggagaagaagatggagaagaacctccacttgagccttcaactccccaaaaccctagctaaggtgcccaagctcctaaaaccctatttttgtgcttttctccctccaaaaatcgtgcattcaatgcaaagggtttagtatttataacccagcttgtgaagtccctgtttttcccttgacagctttaattatgcagcttctgtcgacctgtggcgctgatggatggcgctgatggcgccaactcacaaaacgaatggcgccaacttggcgctcctggctctaaccaacagagataatggcgctgacggtgccaggtaccagaactgatggtgccagtggtgcagctttggcgtgaacggcgccaatctcgagtgttcttggcgctggtggcgccattcttggcgctggtcgcgccaggcttttcttccaagcttggttctccttctgattctttgcttaaaattgctatctttgattgattcctggccattacaaaatcagcataaatctcaacacaaaatgggcaattatcaatgcttaatgctctatttcttgcttctaaaagcttaggaaccttatatgctaggcgcatatcatttatacatacactccctttcattttgggcctagccaaaaagtctgaaataaaaataaatatttctccatgtacgaacccctatcacttaggctgatgaccaggcccaccatgtcagcactctatcagtgttgactaagtaaaagtcaaccctttgactttgaccttaaaaaataataaataagtaaattagtagacaactcttgattttatttaatttttatgtttgtatttattatttattttattcttcaatttggttgtctttttatacctaattagttagtttaattaataatgtgttataaatatttcactatttattttatatttcccacgtttcaagcccacacccttaattattaagtatactcctcacttctattttatcccttcctattctcatttgatttattcgattatgtaacccttagctagtttatttgatttatgggttttctttatgtatgtcaattattcatttatttttacaattcttacagttctgcgttagtattcttttggtaagattatttgatagatgttttatgctaaaaagtttaatgaagtccattgaattaaacaaacaatccaacaaaatttgtatattttttaataccaaaagacttttattagttataaaaaaaattatgattgaatatccctggattttgttatattccttaaaaaatcttaaaagttgtaattaaatatcacaaaaattatttatactattgaaaagtcctaattaaataccacaaaacctatttatatataaaaaatattttaaaattctttgaaatcctaatctaatacacccactaaactactaaattaaaatccacaaaagagcaaaaggatacacataaacatgttcacgatggacataattggttgtatagggtgaggaatctgccacagtctaaggagaggatctggaatcttaggctttgtttgggagagggattttagagggaaaggaagggaagggaagggtaaggtttgggtagtaacatctcattgtttgggagagggtgatcgcggtcgtacgcaaccaaattaattcagttttaaatgtagtactaggaagtgactcctaggtcgtctctcaaggatctcagttgtctgccttatgaattgaaaacgtgtttttggggggaatttttggctgaatgcgaaaactcaattgaaacagaaataataacaattaattgcagtgattaaaaacgagttagacccttagaacaaattgcgcctctaatatccttggttcacgaaaaataatctgtcctgcttaattctcatcagtccagattaatcaactaagtgaagattaatctaaaacgtcattacacgaattaagcaaacgtgaacctcgttagggcaagctctcagaattaagcaaactgagatttctgaatcattcaattcaaattcattaagcatgattcaaactcgaaaaatacagaacagagacccaaacaaggaagagccaagcagaaaacgaattgcaaatacagagaacctccattaaagggttgcaatctgtcctagggtccaaccctaggtttagccttccataaattcgaaattaacaacaaaaacgtaaattgaattgaaacgaaacattaaacgaaattcagaacagaaacgaaattgagaacagaaacaaaattaagatcagaaattgaaattgagaacagaacgaaattgaaattgagaagatgaagcagtaagcgaaaacaatactaaaactgaacgcaaatgtattcagaaaatagaaaacgaaaacagaacacagaaagcagagaacgaaaatattctaaaaaacctaaaaatgaaaatagctgctgcctgatcaaaacaggatgaaaattggctgcttctgcatgggcacagttcccaaatatatagaaacgaaatagtatctgacctaaaaatgaaattgggcttttcctaacaatttttgacccaaaacgaaaataaataaaataaaacgaaaattccaagctgatgtggaaattaatgctgacgcggaactccaatcttcaagtccatgaattaattccaagcccatttaattattaatctgccctgaaaatcaaattagaataattaaacttaaaataatccaaattaattaaaatctgaattatcggtccaattaaatcctaaatgagaaacaatgcaaaatataaacaattaagcacaagttagggattaaaatgagtacagaaaaatgagtaaatagtgataaatagtgactcatcaaaaccccccatacttagccttttgcactcctgggaaaaatccaaaagtagtgcaaggaaaaattctaaagattttaaagaaagaatgacacaccataaaataaacagttttgcacaatcctctatgaaaactgggaaagagaaatgtaataccttgaattttaagcacgtaattaagcctagattaagctcaggattaaggaagataagtatgcttgagagtagtagaggagaggagtgaaaagacatggaaatggttgttctggcatatggcgcgacccacgtgggctgcggcgcgacacgcgccatatgtgtaaaatcagggcagatggttctgccatgccacgcgggtaacgtgaagatccacgcgagtcgcgtgggaaatggccaggaatcatgtttttcctctggggctccacgcgagtaacgtggaatccacgcgagtcgcgtggaaggcccgaatgaatggcgcgagtcgcgtggagaaatggcgcgagatgcgtgggatcgacggtttgcctttataaatgcctctagggctgaaggagaaaggggaaaaagagaaaagaagagagagaaagagagaactgtcatagacgcgctttgagagctccatatcttacccatctctcatctaaacactttcgacccaactgaggaaatgatcagcacctcgagataagtgagataccccgattgatttgtgagaatagctgaggaatagtgagatttgatttctcagagagaaccctgagagcttgagacccagaggcgaaagaggccttgattgatcgggttatcttagggaaagcgactccctggtacttctgaacatcacagaggtaagaaacttgagctctaactggtggttctgtgaattgaattatgtggttttggggtaatcttgagggatgtttttggaggtgttagagccgttattaggctcagactctgtagagtcttatgctcagaaaggtattctgaggggtttagagccttgaattatcattactgatgaagtttgattttggctctgagtcagtctgagcagagataaaaggtggactagatgactagtctggaccttagagcagttgacaaagttgctcatgagactatataggtgagtttgatcggttgaaactaaccattatgagaggttgaatttaggccattgtaagcagagatatgcttggccatagttgatcagagcttgtattgagactctgtagccttgtgtaggctgagagggatcctgttgagggtcagatgatcacttatacagtgattgagtttggctataggaaggatgagagtttccatccgtgtgaacggtttaggaccgtaattgatgtgctatgtctttgttctcatgtaggacgtgagcctgacagctcaggtggtgttgaccacgggaccgggagagccggtgacttttccagagcaggtaagctcttggttcttgcttgtaattcctttactgtgttccaccacactcctttaggggtgatggttttgttgtgttgctatgctttgttgttgattgtttattggtctgattgactgatgagagatgtttgagccctatgagagggtaatggctgtgaattgatctgtgatgcttgccatctgatctggacccagagatgggcgattatggtgcatagttatgattgtttagtttgagatatgcattattgattgtgaaatcctatggtaataggatagatgacatatggttgagatgagtctcatgatggaggtcggcccggtatataggagttttcctaacatggttgtaactatatacttcggaggtgcctctaattgatgttgataggtagtggtatccatcggaatcatgtagatattgatagatggtattatccatcggaatcatatcagtattgatagatggagataaccatcggagtcatatcaatgttgatagatggtgataactatcggaatcacatagatcagtgatagatggtgataactatcggaatcacatagatcagtgatagatggtgttaactatcggaatcacttgatattgacagatgggtgttctttgactgcatatctactgattgaatgagttatggatgttgacctggatgttttcttggttgtgtatctgttatcagtgaaccaggggaaggaaataccttcaagggccctgagtttactgagattttatatctcaccccttgtgtgggactatgttttgcaggtgattcttccagagcagcagagagatcccaaggcaagaagcctgtgcaggattagctgctgatggacacactaggatagaggacttgagcatgttgctcatatattctggttttattttggttatgtactttgaggtaccctgatgggatgtttgtacagttttgtattgtacaacgaaactttgatgtatattcaccatattttgatgtacagtgttatgatagtgactttgatgatgtcacatctagtttatgcttccaaactgcttaaactctgattgattatctatttgattgtggtgtatgtttggtaatgaccctgattagagaattggggcgttacaagaaaggaattgacaatttccaacacacaaagagtcagagaaactacacacttatgagattcatccaagcattcaaaactcagcaaaacaatcaatccgctcaaaaggtgaattaaaagcaacagaacctcaccagatgcactgtatcacactgtatctctcaagtgtttaggcaactgtatattctcaaaacactcatgaagacaaacaacagatagacttgtaaagcctctataatcaacacccaataaacatgcacataaggatcaaaaggtcttttcagggttgtaatgtggccaaggacatgggagaggataaaatatgggataagtagctgcaaaccaaagggactagaggagcaatggggaataagtaagaagtaagcacaaaaacaaaccaaataatctctaatcagcctctaacaccattccttttcctttgcttcaaacacaacaacttttcttcaatttattattttttttttcatttctatatttttttcttttttcttttttttttttattttaaaactgatatatgtatagaaacatgaagaataagttgaacatcagagtaaaccaacaggccagagatatcatccaaaacaatatatacatgcaccctcttacttattcccaaaacaattccaaagctccaaaattccctaaggttaaggtaaataattgttttttcacttaaggcttgtaatgagcttcaaacaaaagaaaggaaattaggctcaacagggttgtcaaaggaattaaattcagggtaagcttatttggccagaggcttatcagaacaaaaatgccttaatcatatctagacatgcatgagaaccaagaaatatcaaacagagtcaagacaaggcaactgtgcaagcaatcaagaggtatagcacacatgaaagaacagatagtggctcaaatcctcacacagggtatatctgtcacagttaaatcaacctttcaaacttcataatcatctttccaagtagagaaaaacatggatttcaaaccatacagtatgaagcaactcttatgtaagcatgaagtaggtgtcaacacttattcaaaacccaaaattcaaaaagaaacatgcaaaactatacacaggataacaaaaacaaaacaaacaaaacaacaaaaacaaaaagaaacagtctctcccccccccccacacttaaaattacacattgtcctcaatgtggcacaacaacagttcagatggacaagtgcgataaaaataaagaggagaaagataaagaaaactccctaaggtttagtggaagatggaagggagtcagggtcaagcagagatatttcctccacaactgcatccaacagggaaggattgctgaggaatggtttaagacggtgtccattgatcttgaagctctttcctgtggactcactttggatttcaactgtaccataaggataatcattagtaacaacaaagggtccaatccactttgaccgtaacttaccacccatgagtccgagcctagaattgtacaggagaactttctggccaacctcgaagtctttcctagctatcaggctatcatgaaacttcttggtcttctctttgtagaactttgagttctcataagcttgaaggcggatctcatctaattcacttagttgcaacttcctttcttcaccagcttgatccatggaaaagttgcaagtcttcacagcccaataggctcgatgctcaatctcaacaggcagatgacatgccttgccaaagacaactcgataaggagacattcctatgggcgctttgtaggcagtcctatgagcccaaagagcatcgtccaatcttatactccaatcctttctgttgggctagacaactttctctaagattctcttgatttctcggttggaaattttagcttgcccattggtttggggatggtatggtgtagagattcgatgcacaaccccatatttcctgagcaaagcgtgcatggatctgttgcaaaaatggtttccttgatcactaatgatggctctgggtattccaaacctgcaaaatatgttagatcgaacaaaatctaccacaacccgagcgtcattagtcctagtagctctggcttctacccattttgaaacataatcaatagctaacagaatatatgagaaaccaaaagaggcagggaaaggacccatgaaatcaataccccagacatcaaacacctcacagaatagcatgggttgctgaggcatctgttgtctccatgtaagggatcctcctgctctctgacactgctcacaagtgctacaggtctttgccgcatctctgaagatggtgggccagtataaaccacaatcaagaaccttgcgagctgtcctctgtataccgagatggccacctggtgcggaggaatgacaaaactgcaagaccgaattaatctcatgatctggtatgcatctcctaatcacctggtcactgcacaacttccacaaataggggtcatcccaaatataatgcttggcatcactctttaatttatcaatttgagctcgtgatgccaagggaggaaaaacagaagcaactaaataattcacaatattagcaaaccaaggggtgggattagaaacagaagagacagtagaaacacttaaaagattttcatcaggaaaattatcctagatgggtaacacctgatcactattctcagctccttcaattctgctgagatggtctgctaccaaattctgagctccactccgatcacggatatccaaatcaaattcttgaagcaagagcatccatctgatcagtctaggcttggagtcagtctttttcaacagatactttagagctgcatggtcagtataaacaataacaggagaaccaagcaaatatgatctaaatttatcaagaacaaacacaatggcaagaagctctttctcagtggtagtgtagtttgcttgggcagcatccaaagtcctggaagcataatatatcactctaggcagcttatcaactttctgtgccaggacagctcccaatgcataattggatgcatcacacattaattcaaatgggactgtccagtcaggtgcctggaggataggagtagtggtcaatgcttccttaaggtgatcgaacgccttcttacagctatcatcaaaattgaaatccacatctttttgcagcagattggatagcggaagggccttcttgctgaaatctctgataaagcgcctatagaaacctgcatgcccaaggaaagaacgaacctctcgctcgcaagaggggtaaggcagatgtgaaataacagatacttttgcaggatctacctcaatacctttactggaaatgacatgccctaaaactattccctgttctaccatgaaatggcatttttcaaaattcaagacaaggttagtttcaatgcatctactaagcactttatccagactgtctaaacacatgtcaaaagaagatccatatacagtaaaatcgtccataaacacctctatgcaattttcaagaaaatcagagaatatgctaagcatgcaccgttggaaggtaccaggggcattacataggccaaaaggcatcctcctataggcaaaagtgccaaaggggcaggtgaatgtggtcttctcctgatcctcaggagcaatatggatttgaaaatagccagaaaaaccatcaagcaaacggtagtgagatttacctgccagacgctcaagcatctggtcaatgaatggcagcggaaaatgatctttccgtgttgcttggttcagccttcggtaatcaatgcagactctccaactgttttgcactctggttgggataagctcatccttgtcattctttacaacagtgaggcctgtcttctttggaactacctggactggactcacccactgactgtcagagataggataaatgatcccagcctgaagaagcttggtcacctcctttttcactacatccaaaatcaccgggttgagtctcctttgtggttgtctcacgggtttagctccatcctccaatgatattctatgcatgcaggtggatgggctaataccagatatatctgccagggtccatccgatggctttcttatgctttttcagaacttgcaacagcttgtcctctttatcagcatcaagggaagtggaaatgatcactggcaatctctcatcactctccaagtaagcatacttgaggtttttcggtaaaggttttaattctggactgggagtaggctgatcagaagaaggaaccagagatggaagaagaatgggttccacaacctgtacctcaacctgcaagtcagattcttgtatactccctgaaacatggttagtgcattctgactctaaagaatttatatgcagaggtacaacacccaatacatcaaaattaatctcagaaacatactcatcaacaacatcattaagaatctcagcacgaaagacagaatgattttcagatggatgtttcatggcatcaagaatgttaaaatgaacaacaatatcaccaaactccatattcaatgtaccagcatacacatcaatcttagttctgactattttcataaatggtctgcctaaaatgagggggacagaaccatgggagaatccctcctccatatcaagcacataaaaatcagcaggaaaaatcaattcaccaaccctaactaagacatcctcaatgaaacctatagggtaggcaacactcctatttgccaactgtatcacgacaccagtaggttgcaaagaaccaagagacatagatttaaaaatggacagaggcataacatttatggaggcacctaagtcaagcatagctttatcaaatttattactaccaataatacagggtatgctaaaagtacctgggtcctcacatttttcaggcatgcttggaacagaattacctgtcatagaagacacatttctgcccatgctgactctctcaattccagtcatcttcctcttcctcttgttagtgcacaactccttcaagaattttgcatatttcggaatgtgcttgatggcatcaagcagtggtatgttgacctctactttcttgaagatctctaatatttccttatccacctcttccaattttttgtttgaaatcgatctaagaggaaatggaagagggatgggaggctgctgctgcacatcagaattggtgctggaagaaggtccacctgcatgaatttttccagtaccaattggatcttcatttttctcgattattggtacagatgcaggggctggtataggaattggtacagatggaggtggggacactgcagtaggtgtgtcaatctgttttcccgacctcaatgtgatggcactaacatttttcagattctgcactgtctgagatggtagtctatctgaattttgtgactgtgcctgattgagttgagtagccatctgccccatctgattggtcagactctggatggaagctctggtctcttgctggaattgaaagttttgaagggtcatctgtctcacaagctcctccagcgaaggttcagaagtagaaggttgaggtgctggtggaacaggtacatcttgttgttgcctctggtactgctgctgttggattggtggaggcacataaggtctagttgggccagcagaaccttgaaatggtggtagtggaggctgctgctaatgctggttgtttgaccatctgaggttaggatgatttctccatcctggattatatctgttgctagacaggtcataattctgctgctgttgttgttgaggcctattgttatagatgtttgcagaataggcttgaggagcatcagggctaacagggtgctgcagagaaggaaatgcgtcagtatagtgatcattggaagtgcaaacaccacaaactctagcaactgaggcagatttttggttgacagcaagctgagtaactaaattcaccaaagcatctaatttgccttctaatttcgtagctgcagatgaagaagaattagcagctacatcatgaactccacgaataacaatagcatcattccttgcactgaactgctgagagttagaagccatcttctctatcaaatgcctagcttctgcaggagtcatatcaccaagtgctccaccactggcagcatcaatcatactcctctccatgctgttaagtccttcataaaaatattggagaagaagctgctcagaaatctggtggtgtggacagcttgcacacaactttttaaatctctcccagtactcatacaagctttctccaccaagctgcctgatcccagaaatatccttcctgatggcagtggtcctagatgcagggaaaaatttttccagaaacattttcttaaggtcatcccaaccagtgatggacctgggagctaggtagtatagccagtcccttgccactccctccaatgaatgtgggaatgccttcaggaaaatgtgatcttcagggacatctggaggttttcattgttgaacagactatatggaattccttcagatgcttatgaggacactctcctgcatgaccatgaaacttaggcagcaagtgtattagtccagttttgagaacatatgggacatcctcatcaggatactgaatgcacaagctcgcataggtaaaatcaggtgcagccagttccctaggagtcctgtcacgaggtggaggttgagccatattattctcagtataatcagcagaatcagaaatagtatgcacagaattaaagctggtagaatgctcagaaggagaatactcagaattcaagctaacactatctaaggttacagaatctaatgaaaattgcctagaatgcctaactaatctatggtaggtcctatctatctcaggatcaaagggttgaaggtctcttggattgcctctagtcatgcactacatgcaacatatcaagcatttggcagacaggcacaaagagaggtaaaactagagctatactcaaacgaagtccaaatgagctaaaattttgtgagaaacaccctaaaatcatgaaaagatagcacaccaaatttcaaaacctaattcaaaggataactaaataaaacagattaagaaaatatagaaaaataggaaaataaaacttgaaaaataaaaataaaatagaaaacagcctctttttgaagatccgacggtggccaggcagcaaagctgcctgggttagatagatttttttttctaccccaaaagcatgtataatgcgtcaaattctgacggtcggatcaaaagttatgattgttttaagttttagcaaaaaaactgaatcccaaatttttgtccatcaaaatctgtgatattttagatgcttttggtatttttccacacaaatatatgctaaaagaagttaccacacaaaaattcaagcaaaaataacaaccctagctatcaaaacaaaaaagcgcaattaattcagaaaaactgtgcactgttcatgttactattccttgcgactgcggcttcctgatgtgcgacttgcttgctcaataccctgattggacctgcagagttgatcaacacaaccttatatgcaataatcaaaaagctcgaagcaaatattatagccaacacacttagaacagacttggcataggaacagaaaacagaacagaattaaatttttttttttttacgaaaaataaacactaacacacacaacacagaaccctaattggcagaactgatgatccccggcaacggtgccaaaatttgatcgcggtcgtacgcaaccaaattaattcagttttaaatgtagtactaggaagtgactcctaggtcgtctctcaaggatctcagttgtctgccttaggaattgaaaacgtgtttttggggggaatttttggctgaatgcgaaaactatattgaaacagaaataataacaattaattgcagtgattaaaaacgagttagacccttagaacaaattgcgcctctaatatccttggttcacgaaagataatctgtcctgcttaattctcattagtccagattaatcaattaagcgaagattaatctaaaacgtcattacacgaattaagcaaacgtgaacctcgttagggcaagctctcagaattaagcaaactgagatttccgaatcattcaattgaaattcattaagcatgattcaaactcgaaaaatacagaacagagacccaaacaaggaagagccaagcagaaaatgaattgcaaatacagagaacctccattaaagggttgcaatctgtcctagggtccaaccctaggtttagccttccataaattcgaaattaacaacagaaacgtaaattgaattgaaacgaaacattaaacgaaattcagaacagaaacgaaattgagaacagaaacaaaattaagatcagaaattgaaattgagaacagaacgaaattgaaattgagaagatgaagcaggaagcgaaaacaatactgaaactgaacgcaaacgtattcagaaaatagaaaacgaaaacagaacacagaaagcagagaacgaaaatattctaaaaaacctaaaaatgaaaatagctgctgcctgatcaaaacagaacgaaaattggctgcttctgcatgggcacagttcccaaatatatagaaacgaaatagtatctgacctaaaaacgaaattgggcttttcctaacagtttttgacccaaaacgaaaataaataaaataaaacgaaaattccaagctgatgtggaaattaatgctgacgcggcactccaatcttcaagtccatgaattaattccaagcccatttaattattaatctgccctgaaaatcaaattagaataattaaacttaaaataatccaaattaattaaaatctgaattatcggtccaattaaatcctaaatgagaaacaatgcaaaatataaacaattaagcacaagttatggattaaaatgagtacagaaagatgagtaaatagtgataaatagtgactcatcagagggattttagaggaaaaggaagggaaaggaaaagtatgggtagtaacaatttttgagaaaaaaaatttgaagatttttaaaactcctctgaattcatccaaagcctaaaaattgttgtcccccctatttgagatttttagaaggaaaagtaataaagttactatcctaccccagccggtgttaataaaattactatcctactctagtcagtgttaataaaacactaaaatacaaagcactaaatcacaattcaaggacaaaattacaaaagtatcttattaactctcaatttctctctcaatatatctttaattcccaaacaagtaggaagaaacttccctcattttcctccctttccttcccctcccttctccttaaatttttttccttttcttcccctcctaactcccaaacaaagccataagaatctgccacagctctccaacctcttcagcgatctcaaggatggagttcaagaaacgaaattagtcagccaactccatttgggtttcaactaatgaacaaggttgtataacttgtacctatttcaaatctaggtttgcaagacacacttgttttttaaattgataagccagttccattggggttctattggtgtttttttaaattgattttggtggcttgatatagccatcaagaaattgtaatttaaatttcataataaataatgacgacttttcaatcgtcaaaaattacattttgaaatacttaataatcatgttattatttaactgatgacagggattcaaaatataatttttaacctataaaaatccaacacaataaaaaacttattaagaatccaaaataaaatttgataatttatcacgaacctaaaatatattttatttattattaatattatttggctcccatatatctttttttaacatggtctaaaaagttgttttatttttttacctgctcatgtttttaatgcttgattttatcgaagttcttatgtttttatttctttaagaatattattaaacaatatataatataaatttaacaattattatttgtaatccatatttacatttttattgatattttatgtataaataatttgtaaatcgacactaaaataattttttacatctttgcaagttacgtacttgcaagaacatgcaaactaatagactagcatcacaaaagttttgtggactagaatcacatagctacttcacttctcttaaaccttaaagtttaatcaattaccttgtgacacaaatgcaattccaaagacttcagtcacttttatgaccttgttcatggaaacaaacaaatcgggaaatttatgtgtagctcaccgtttcaactctttctcttttgtcttctcacttaactccaaacacagagacagtgtgtactaataatgctggctaacaaaggaaacttctcacttatttccttcttcccaccattccaatttcaagtatataactctccagaaatcacatgctagctaattccatataataacaatgcaaaagagaaatcacccaactttgtactaaacctgctgattagttccctagctagccttgttaatttttgtattattttgcatggcttctaagcaagaaccaaagctccctttaacacttctggtggacaaagaaagaaactctgtggttgtggctgaagcaagtggaaacttgatagacattttgttcagttttctcacccttccactcggaactatcataaggcttgtgtcgaagaaacaagggcacggtgaagccgaagagattggttgcatcaacaatttgtaccaaagcttggaaaattctggtgatgaggttttctggaaccatatttgcaagagaatgttgctttgtccgcgcaacccttgcgaagcactttgccagaaactgaaggtgaagttggatgacacaaagccaatgaagtacttcatgtgtagcaacaggtgtagaaggggttgtgattggtttctgagtacttttgctgaggctagttgctactgtgggaaattgatggacaaagaaatgaagctgcatggagattctaatgaaggaactcatggagatgatgtttttgttaagggacaagccatgtacttgatctttgatgatttaagggtgctacaaagctctcctggtaactctgctcagcaacttgtccaacttggctacaaaaacttccacaagctgacaaaaaggaccctgaacgttggaataaaggaggtaatattgcttttcattcaattagcatggttgcatgtagattagcacataaaattttgtttgtaaatttgcaattttgcacaggcgtaggttaataagaatttattacatactgcaatatagtggattgaaatgaacattgtgaggggaagttcatatgttgcttaagatcaattttaggaattgcatttctctgctttatgtctgtccatcaaagctgataatctttcttaagttccttaattatgctcgtaaacttgtgccagggaaagaccagcaaaataagtgttaaaaaatagtatgaaaggctgaggcctgagggatacctattttatcaatgattaatgatacaataatagaggcatgagcacaacaatttatgaaattgttaaaatctcaaccaattgatttgtcaatcaataattattactctaagctctgttttcaacgtatgccgcactctatatgaaactttgttatttgatgaatatatagtacatgaaaatttcttatttgatgaatattgtgagtatacctctttttcttttagattttggagttactaaagcaggcattaacctccaaatctcctcttagcaaagtattcttaggaaatggagaatctaagcggatgtgcactttctcaacaaaacttagaccagaaaatcaaggctggaaaaattacaattccatgataaaccttaaggtaacagtgagaaaatcaatgaaaacaatactgtatgctgaatctgagggagatttggttgattatctattcagcttccttacaacgcctcttggatctattctaaagctattggatggaaacttttctctggggtgtatgaataacttgtacaaaagtgtgaaggatctcaatccattatggttcacgaatccttcaggcactcctttactgaacctcaaggtggctcctcaatttggttgcaagaggcagccaacacagctttgtgaagaagacactccttgttactggtatggcacaggagtaattaaaagtaatatatgctatgccattggaaatggagtggtttcaaaggaacatagtcttattcgacatccaggggcaatgaaactttttgaaccaagatcccctgatggcacaagaggatcctctgtgggctttgttaggaggccatcactatttgttgtgtgggatgacctgcaagtgacaccaatggcaaatacttccagcattttattgctccaaaagctgaatgttccattagatgatttggaggagcatgagctgagaattggggagatagaggtaacagtctattctttggtaaatttataatgttgttaatgaatttaattaaattaagataaattccagggatattctctttctaatcctctctctgtgattggctggaattaattgaaaattaccaattttcatgcgtcacacttatctccaatttaaaagtgtgacccaccaaaattgattggtgattttcaatcatttccagataactatagatagcgtgttaagaatagagcattagacataatgttgttatcattcctctaaaattattttttgtcgaatgattgaatctgaagaactatgtgcaatgtttttaatttccccctctaatatattagaagtaatgactttcattatctatacacgattaggctctaaacctgctgggagcttctttgacttccagagctgctttgacagaaggcctgttctatctcctgatgaagccaaaggaagaagctaaagcttgatcttttttcccgttgttgttaagaagctgaataataggcaaataaggcaatcgtgcatattattatgtgtcaattgtcaagcatatattattcattttggagcattaaactttaaactcctttgctctatctagaaatgatctttaatttgttcgtaaactctagaagtgctataatgctaatttcttattttctaaaatatgcataaaagcaaaagcagtggaaaaaaatatccatagaaaacaattaagataaaaattgtttttacttcttcctacagaaattttaaaaccagatccaaataaggtcattttttaattatattaaaaatataaaattaaaacaaaaaaacgtttattatagtaaacactcctaactttttatttgtgatcattggagtagaaagttaggtaaataatcaacaaaatagtgaaattaaaaagtaattaaatattaatgtttgacaaataaagttaatagtattgcataaattctacaaagtgtgacaatatacatatgctataaaagagttagaaaaataaataaataaagtgcgtgtgcgtttggagagacaattttaaacaagcaaaacaattttttgtttgttgagtctgaagttgtgtttcgaaggacaagcaaaagaattcttgatttgttgagattgaagatacttgataaaaaagaataatagtaatagtatagaaagagattcactaaatacctgaattagtaaaatctgtgattttgtcaatagtgaaacatagtttcaagttgagaaaaactagtataaatatatgtgatcattgctattttcttactctttcatttagtctactgataaggaattgaatatgtgagatatgattttgctttaaaaaaatgaatttatataaaaaatggatatacagactgattagttaaataaatggttttatttttttttttccgtatcgcgctcgagaatagacagattggtccatagattcaaacaaaaaaaaactttcattttttgagctatggaaacatgagaaaggtaacaaataatagaaaaaaaatataaatataaacatttaactaagtattaaacatttcactgtaattatcaatttattgtcaacatgtttaaatattaaacttgtcttaacaatgtacaattgcattttgtaactaaaatacagcaagatatttaaaagatcaaaagccttaacatatatgtaactaaaatataaccaattaaatatcaaagttcccacatatatatataatcaaagaccatcgattagtccgccggtttcaagggttaggtccaaaatttactatagctatgcagaactttttataaaaaaaatggtctattattcacatgatctatgggttcaatgggccagtcaacggaccttgacaagttacctacccctaattttacaaagttgatatatttcctcataatatatggtacctttggttcatcatgttgatcttattttttaaaattgcttttgtttatcttcctcaagtgcattttctataataaaaaataacatgaaaagaattttaagacaacaatagcgtgattattattttcgtcccattatttttttaagagtcttgctaattattattggttaaggaattaaaagagtaaatattttattggaaatcatatgggcagtgttataaaatatggtttggcctggaaggttagactggtccaaccaaaatccgatggtataatcgggtcgagtgcattattggaccactcaagtaagtgaccgggatgattcggtcaaaccagactgattttgatgaaatctgatgacccgactgattttaatacctggactgggttgtgccaccgccgcactacaagggaacttgctgtgccggcctcgcctccgataatacggaagcggaagaagcgaagatcacatgaaaggtgagaaaatgaggcacaacacgtaaaaggcgagatccacaaactgaggcgcaatgatagcattgaaggggaagagatgcatatatatatatatatatatatatatatatatatatatatatgagcattagggtttttcttatttgggccagatttgcttcatgcagctcccattattgttgtactccttatggctcatttttctttatcaaatacttgacttgtgttttaatttaagtagttgctatttacacttttttttattaatacattttacttgtgttatcaactttaatacttatatataatataattttaaattttgtaatatagatcaggttaagcagggtcaattattgacccatcggttagaccaccgacccattacctcgaccgggtcaatcaccgggttgagttttataacattacatatggaagtgcctttaaaagttataggatgagtgtaataaaatatgaaagtatggtatgaatctcccacctttattaatcaccaaaagttgccttatgtaggcattgtacaaactgacgtaaatacaaaaagataaagaataaaaacagaaaacaaaaactaacaaatcttatcttatctagagtttgttatctcataatacaaatataaacttatcttataaggtttgttatgttcatatcctaactaacagatttaatcttcaatactccccctcaagttggagcatgcaaatttgaaatgcccaacttgtcaagaagatcatgaaaagcttttcttcccaatgcttttgtaaaaatgtcggcaagttgcaaattcgagcgtatatatgtggtagcaatggttttgtccagcaaatgttcacgtataaagtggcaatctaacttgatatgtttagtgcgttcatgaaaaactggatttgtagctatatgaagagcggcttggttgtcacaaaaaagactcattggtttagtatgagcaatcccaagagaagctaaaaatgatttaatccatataacctctaaagtagttgtagccattgaacgatattccgcttcagctgatgatcgagaaactgtggcttgctttttcgttttccatgatattggtgacgagccaagcataataaaatatcttgtaagagatagtcttgttaaaggacaggtagcccaatctgcatcgcaataagcatagacatggagatcactttttgcacctaaaagaattccctgaccagggggtaatttgatataccgcagcacacgatgaacaacttcaaaatgtgcttgtttgggagattgcatgaactgagagagaatatgcactgcatagcataaatcaggccgagttatggttaaatagaccaaccgaccaactagacgacgataacgtgctggattatcaagctcgggactatttgaaagtgccaacttgtggttttgctccatcggaaattcaaccggtttacagccaagaacaccactctcggaaagaatatcaagagcatatttgcgttgggataagaacaagcctgaagaaccacgggcaacttcaatcccaagaaaatacttcaaagggcctaaatctttaatttgaaagcaagagtgaaggtactttttaacttcttggcaagcatgtgtgttgtttcctgtaagaatgatatcatcaatgtacactaagagtgcaagaaaaaattcattgcgttgaagggtaaacaatgtataatcagctcgtgattgttgaaaaccataatcaaccaaggaagaacgtaacttttcaaaccaatttcttggcgattgtctcaaaccatatagtgacttctggagatgacaaacttttccatttgctgaagatgagaagccaggaggaacacgcatgtacacttcttcatgcaagtcgccatgtagaaaggcgttattaacatctagttgatggagctcccattttttagcagctgccactgccaagaaagtacacacacttatcattttggcaacaggtgcaaaggtttcatcaaaatcttttccttcaatctggttattcccagcgatcacaagccgtgctttgaagcgttcaactgttccatctgacttgtatttgatacgatatacccacttgcagggaagagctcttttgcctggaggaagagtagtgagagcccatgtatgattattttcaagtgcttcaatttctgttttcatcgcttcacaccaacgaggatcaagaactgcttctttaaaattacgaggttcaatacctgtatttactgcagcaagaaaggctctgtgcttggccgaaaagttagtataatcaacatagtgattaagaggatagggactacctgaggctcgatcaactgggttgtttgcactagagtgtatgtgtgcatccactgtattgcactgatagtctttaagataggatggtgcccgccgttcacgtcgttcacgagaaggcatagtgctactctctgtttggggccctagttgctggtgtgcttcaggttgagacatatttacgctccccctgtcttccatacttactgatggtgctgagtcagcaatatgaggcatgtctgagatagattcttcatgtggttgttctggaacagcatcctccaccacagcatgttcatctaaatttgttgagaaggatggataataacttggtagagctactggttgttgtgtagatgctttagttggatcaggaatagaggggaacacatcctcgtagaaaactacatcacgagaaacaaatatattatgtgactgcaagtcaaacagtttccacccttttttattggtaggatagccgaggaacaaacacttgcgggaacgagcttcaaatttgtcagatggttttggattttggtgagcataacataaacatccaaacactctcagatggttgtatttaggtggtgaaccaaacaacaactcatgaggtgtttttccattatgaagagttgtgggcgttcgatttagaaggtgggcagcagtcaaaatgcattccccccaaaattcaatgggaaggttagcttggaaacgtaatgctcttgtaacgttaagtatatgtctgtgctttcgttcaacacgcccattttgttgaggcgtatacgtacaagatttttgatgcaggatgccaagctcattatataaattgattagaagtttatgctagaattccgtcccgttatctgtgcgcaaaatttttacacaacttccaaattgagttcgaatcatggcaataaagcttttaatcagcagtggtgtttcactcttttccgccattaaataaatccacacagctcgactgaaatcatcaactagtgtcagaaagtaatgtgcacctatgaatgatgtcttcctatacggtccccatatgtcacaatgtatcatatcaaaaggttttgcactttgatggtcactgagagaaaatgaactacgagtttgttttgccctatgacaaacatcacaatttatacaatctttattcttacgcttatgctgagagatgacaggaagaaacaataaacactgacttgatggatgtccaagcctttgatgccaaagttccacagattcagtttgttgtacagtaagtgcacttgcttgacgtgcttcatacacatacactccactgctttgattacccagtccaatacgagtcctcaagtctgggtcctgcaagaaacattgtgtgttagtaaacacaatctcccatttacttgatcgtagaagctgattaacagaaataagattgcattgtaagttaggtacgtaaagcacgtcagtgattgaaaatttgtagtcaaacgttattttcccttgctttttagcacatgtttttgttccatctggcaacccaatgatgactggatctatatttgtaacatcagtcatgatatcgagcctgctcgtcatatgccttgaggctccactatcaatcaaccaagaaagaggtaatgtatggttaccagataaattagcagcattagaatgctttatgtccaccaaggatagaagtcgttccacaacttcaggtgttaaggctgttagagacttagaaatattttgttgatcaccatatcgacctgcattagcttgaataaactggtttccacagctaccacctctgacaggtttgtttggaaaaccatgcagcagatagcatttgttgacatggtgatttgatcgtccacagtgtgaacacgatcgtctctcattttctgcacctgtagggaaggattgcattgaggcatcaccattcttactcattctggaaaagctttgcgcaggaaaagtacagtagtgctattagataaaggagtcacaggttatcatgaaccttgtgctcttataccataataaaatatgaaagtatggtatgaatctcccacctttattaatcaccaaaagttgccttatgtaggcattgtacaaactgacgtaaatacaaaaggataaagaataaaaacagaaaacaaaaactaacaaatcttatcttatctagagtttgttatctcataatacaaatataaacttatcttataaggtttgttatgttcatatcctaactaacagatttaatcttcaatagagtgtatctcaataaaaatatttctcattttatttctttaatcaataacattttccttttttaatttgttcaattttgtctcactattattaaaagattgagttaggtcttactattttcaaaatcggagcaattaagtcatttttgtccaattagattaattaacaaggttaactttacaaattttgacaattcagtttacaaatagggcggtttacaatggcaatattagagacataatccttaagttaaggtaacattatcatataatataggattagcaccgcattaggaaaaaaggtaagatccatgggtcccaagaccattaatatttgtatataatgggtgagactcttaagagaaaacaactatttatgcttatttattattcttatttaatatattgaaatgatatctgattaacttgaacacaaaatgcctttatagattctcatcccctcagaactgttacgaataataataataagaggcctagattttggagggtgtacactcgtagaaataagcaaggagttaattagttgtttttgtgttcattcattagaacactactagaaaaactgcattttacgacagccaatctaagacggttgtcgcgaaaccgtcttagaatgcagggcggtggctttctcgtaaataaaacgaaaatttcaaatacggttgatgtactgaccgtctttgattgttaaaacgacgacggtcatagtttaaccgtcttaaaattgcgttttcaaatacgttttgtacattaaccgcctttaaaaatttggtaattaataaatgaaacggcgccgttttgagctttgtgtttataggccaggagtggggttgttcgtgccctaaactcctctagctaagccctcgttccttttcctctgagaagtgctcccctccgactccgaccccgacccagcctgagtggttcgttgccccgacaccgcctgagtgccccaacccctcctgagtggtctctggtcccgacaccgcctgagtgcccgaacccctcgtgagtggtatctggtcccgaccccgttggcctctatcggggtctctccacccaaggtcgcagctttcccgcctgagtcgcctagctcccaccattgtccggcgactttggctggtttgtatttgtgtggatgctgacagcttcgactggtttcaaacaggtatgtctcgcaaacccacagggtagggttaggttatagttttactttcaccctggttctcctcttgcagttgttaaatgcaatatactgatattgtttgtagtgaaatgttggattagatactggaaagtaagcgtaaaattttatcttccccagttggctttctgctgaccccgccaacaagaagggttgtcatctgactgcgaaagatgagccatatccaacaataatggtagatgatttacaaatctatgatgttttgttgctactaatggttgataattgtgttaaggtttcaactttaggattatatatatgatctccaagtcttgtctacctctgtttaaagtttaatttggcattcagctttgtgtttcttcatgtgatacaaccacatcgtaagtgcgttttctattttactttgtaactttcaatttaacattactcagaaacaaactatgttcatcagtttggataatacaaatctgacacaatctctgtccatatgaattggagaagaaaggttcatacatatgcatacacaccttatatggttgatctttattcaaatattacacacttttatgaaaaaaaattttccatagaaaaccctgatatgatagttctgcacagctttgttgtcatagaaaccccaaagaataatgttagtaacaacctgtttattattgagtcaaaagttataacagacccttgctaaatagcctgactcgaatgaagccttgtgtataaataatgtcaataaatgtcttttaactttcctaaagattaatatcattagcacaaaatatatgtgtcttatgatgtgttcatcaataacgaacaattgttcctcaatgagtcaactttctggactgaaaaacagcaaagttcgaaagtttagaataacattaattgattccattccctggaagaaagtcctcaagtagtttgtagtgtctctctggttcgtgactatcacattctaactcgtaggttgtcccaaaatcatagttggtcgcatcaagttccagtttcaaggatttccactcatgcacagccctgacattcctaaaaccacctaagcagacaaccccatatgtgatttaacaaaaaatacggctgtgatttaaacaaaaatgatttagtaactatgtacattttccttttaaaaatactagattgaactcatggaattgatggagagacttatgaaaatttcaaaagggattgtgtagagggaatttactccaatgttgacctgcgatatactggatgagagggggttgatatgcttagtttttcttaggcaaataatgagtaaaaactaaacttactttttctatctttttaactcttttcatcttatcttacaagtatctgttttctcttcctttctttttgtcatatagaaaaaaaaataaaaattatacgatactaatatacattttgtcttctgaaccgccgttattccgtggctgaaagccacacatgttctaatgactttcaaaatgaatgttcctaaaaaaatacaaaattttgatgcattactcttgataatgtgatcatccacttaattacaatttacaaacatgtttcctacaaggttaaaacttgctagaattcattctctacgtctcaatatgtgcattatgagttaccacatcccatatgtttaatatttctgcataattttctaagttttagatcaatttactgctttcataactcatgcttttgctatgaaagaattaagatcgaagcatatcatcagttaaccagaatgcaccttgcacctattaattaattttttctgatgtctatattctattcttctgaattggaataacgaatgcaacatcaaatgggttttggatatataaggtcaagctcaggacattagctctttggcacacaatgaattgtattttccattttgaattgacagaagcaaaatattcatctttgtgtgtgaaggcatttgtgtggaagatattgcgcaagggacagacaaattaagttaaaaagtcataagttaaaggaggtactcttcaaagctgttgcacaaggtattccaacctatttcatgatctgttttaagttactacaagctgtgtgctaaaaaattaggtctgtgatagatatttattttattcggtagataataactgcagttttgaaaggtataacacggtgtattagtaatgggtccctagatcattgattttgaagcctatatttccttgttagacatttctgaaggaaccgtgatactgtaaacgctcgagcatttacagccttggttgtttttttgttttttccatatttgttaactgactagtatactcatgaatcaaatctcagactccataataagccttcagatcattctttgtaccctcataacgactgaagaaacttcatgaactctctggacaaagggcttaaagaggaaagggtgttcctctgtcactttttttcgtcacataaaaagtactgtaggaagtggtggggttagcatgggaaccttgggccaccagtgtcaaagggtgtggttgtcggctccgcatacgccaaaaagacaaacaaaatcttcgaatttgtttaaacaaaatctaggaagtgatggggttagcatgcagacgccgtttgtacaaaaaatattcttgaggcgtctgaattttgtgggattgaaaatggattgtatacatgtgatagacggattgtgtaaacaccgtcacggcagtgatgttagttggtcgatagggcaaattaaaaaacaaatatatgcacatcgactgagattaagaatgacagtgactataacaggaattctttatggtcattttgtaatgaacaacactctagctagtataaatcaatcccaccaattccttattcatccatagatcctcttatctgtagctatatcttcaattttcaatagtttgagggccttggtacttgataaggcgtgcaaggtaatttgtagagttcatgagctccatcaattagttttctttgtagtagtggaagtttgcagataatatttcacactcctcactttcttaaatcagttctctcaaaaactattcctctttccattttcttaccttttgttcacatccaggacacacaagacagcaataacagagagacagagagagggagaaagagaaaatcaaaaaccctctttcaatgcatgtcatagatcgtgtttaagaaatagggagccaataacataggagataagatgtataccaacctatcagaatcatatttacataattgttctgtagcacacatttgttattccaaaatcagttgaattgaataaagaaggattgcagttgcttgccataactggtattgaagaagaataggttaaagtttgtcaaaccaagctgtaggattttgttttaagccatacatggctttgtgcactttgcacacaaggtggttgttgctgttttcaaaacaacgactttgagtatatggctggctggcaatagacaatgaaattttaataattggaattgagaaagaaaaaaagaaacacaaatgtgagccccactagacccataatgtatgcatgtatagttcttttctctctttgatttaagttttaagcatggttctattctacacatcttttgctttgcttgtcatctgctttattttaacaagaaagttcatccatcccgtgcttcatcataagctttctgttgtctgttgactttatgctagttttgtctcaatgtgttcaggttaaaccatgttgcttctctgagatttctcctggaccattgcagcctcacccacttctaaattttttgttcaactcattgctggtattctacttctcatgcagttgattcttaagatgagtattcatcactactcaacattaatttataatctattctctgtgtaggttcctttatcatttcatgtagccatcggagttcttgttgaagttgtgactaaacacgaggtatggttgcccaatttgattgaacacctatcattgtcatcattattgatatgtttggctaagtgcacatgtctgtaattattttaaagatgtcattgtactactagtcttctacaatgttattgatgtaatttctcgtcaaggctaaccaccatagctgccatctcagcgaactgatcccaatatggtagatatatgagtgttgttggtgccatatctggtagagtcttcggtatttatccttgaggcaggtaccttcattcttccaatcatcgtcccaaaacagcgtctttgacccacaacccagcttccatttcagacctctaggaagcccaaacccatcctcatttaaagagcagaccgatctaagatctctccaccaaagcgactcagcccccgaccttgtacacgcccgcaagtttctccagctgccatattttgattccaaaacttgggcccaaaggtcagctgactgatggaacaggtttcaccaccatttccccaacagagcagttttatccttgctaatgtccttaattcccagaccctcatattctttaggttgacagattttcttccagctgacccaagcgattttcttttgtacgtcaccaccaccccataagaaattcctttgaattgtagttaatctatcaatcaccttttgcggagccctgaaaaaagagagaagcaaaatatgaatacaattaaggacagatttaatcaaggtgactctccccccaaaggataagtgtttgtgtttccacccagccaatttagtctcacatctgtcaactagaggagcccaggtcacaaagcgtttggggttggccccaatgggaacacctaagaaaaaggaaggtccaactgcctgcaatttaagtagcagacagcatgattaacccactgttcatctctgtcaaacaccccaaacctacttttagcaaaatttattttgagacctgatgctagttcaaaggtcctaagtatgaccttgagggaaatcacatttttgtcatgcttctttatcatatcaaatcctatgttataaatacattctcaattaaacaaaatgattagtaattatgagtgaacatgttatggtgatagactgtggacggtaaggctgtcatgacatcatgtgtgtgcccattacatgctgttcggtcttgttcacgttgatttgcttacttatctgtgtatgtcatcctcatacctttagtacagaactagcattttgatccataattttcttgtcagcaggtataatgagaatgatcttttaatgcagctttgcaaatgatgaagtaaacttgtcaaggtattcttcacaactgccgggaatcgctacttttatatttggtagtgatttgatgatagtatttcaagctattgctgatgatgagctgtattaatgtaggttatctaattaactactaacagttttcggttattgtctgattgtaactaaaaatgcctaactaataggggctgcctcacttgatgcctatgtaacagttgtgttgtgtcaaattccatgtacatgaattccaaaatatgtgaactgcatcccacaacaaactacagtttggcaaaaaaaaaattaaaaaaaacagggtcgtcaattaggttagagtataactgtagtttataattgaatgattggttctcaattagcttaggaggtgaagcgacaaatttgtgaagtatttcatcttgcaaaaagtgaatagactttaaaatttgaattaagcaagtaggtttttcatcaaaactattctgcctgtcaacattcgctttgtcatcaaaactatgccagctgtcaatatgatgttgctggtaagttaatcttagtcgatcaaataaactaatagcattacaaagattttgaatttttctatttgatggagccaaatagactataaatcaaatgacaacaatgtcattaacaaggcgaatgtctagtttgtcatcccctcatatatactcccaaataggatgtttgttcatctgtcctaggacaaagttaccaaagaactggcagaagggctggtttaaacaagtaaaccactgaagccttagaagatagattttaaaatcaaacaaataggttggtcaattttccaatttgctgcaaagtataccatcatattggtcaattctgggtcaaatttgcaccccctttcatctaaaatcatcccatttgaagccttaggaaacataagttcatgtaaattcattaaatccatcaaatataccctccaattaacaaatctgggactatgcaaacaagttgttcactgcctcttacgagcaatttgttattcatgataaccaatatcagttccaaagaattccaaatacattaaattctgtttgatagaagcttcttttcagtaatatacataatcccttacactgagtggcaatagccatcctcaaggcaaacctaaacgacacactgtcaatgcatcatacccagccaaattatttcaagtaaattgattatattttctccctcatcaaccaatgagtagagatatatatgttccaacctgctaacatctttgaattcaacctcctgatcagttaatgaagttgatacacaatgcatacaaattgcagagaattaaaatgactttgtttaggcaaaataagcttttaaatgcatgaagttgcacaatatgattcaatatatgcagtttattatataccatgcggttattttatatttgcattctctaagacaatgcattccccttgttgaatagacttgatcaacaatcctgtaacccatagaaattttgttgacacaacatcagatttaatcttcaaaattgtcgtcatgaccaaataaagatcatggagttgtcttgcatacaggaatacaattcttttgtgtctgcaactttagttgtccaatgaaaacatataatagcttttcacctcaactataaagtcatgctgccattgcccaataaatgcatggagtgaaacaaacattgaacttacttttgtcttgtatcattgggagtttcatcttcactgtctactgggtcccattttatatcaaacacttcttattcaaattagtgttgtgaaatttgggtgcaaagcaagttctgtagacgccaattaaatgccctataattaaaactgacaacattatattactatatgtgatttctggttacaaagtataactgcctattaatagcacataatctttcctagtaacaaccttaaagcaaatcaaattcccaacaatccttagaccaacctgtccccgtggcaacatgtattacaagcacttgttattccaaatcaacacacacatatatgaattcctctgtattaactatgtaatactttgaagggacgcaattcataaccattacagcacacacaccaccatacaatcttaaaatcatttgggtagctgtaggatttttttgaatactgccttagtgaaccccacaatattttatttttttacataagtctctttgttcacattaggcctaattatttgcagctacctgtacacattcgacgaccttttaaatatacttgttcagccggaaactttgtttggctgataaggttgggcaaattaatcttgcttagtcagtgttctcttcccatcctttataatgtacgattgcttatgattgggtagaatggatatgtatgaaattggtggtttattgttgtatataaataacattatcatacttattattgtttcatgttgcaggtctttcttaaatagtcaagtagaatatacaaaattggcagcttttgtcattctccaagaataactaattcattgtcaccggagacaacactgcatgctgtcgatataacattactcccgcaaaagcaggtatggacgctgtctatgattcctttgttgagtatacatttttgtttaggtctcaagtaccttttctcataacatcaactgcatagttgttcaaccttagttccccgtttaaggttcaattggatgatttctacagatagtttgtattaatcgttcaattgaatcttgaattgtccgtttggacagtttgggaagttagtcattttatacatcattcgtacatagtggttaagtatgagttgtttaatttaatgatatttcgggttcatgcatcttcgtttgttctctgagtgcatacaatgagcagtgatgacaacaagtcactgctctcatgttgtgtacttggagaccaaagggaaatgctgccgaaatttcattaaattaaaccaaccatacttaactactatgtatgaatgatgtataaaacctaacttcctgaatggggtagggccacaccttttgcaaagattggaaattcatttacatgcattgaacatttagacattcatgatgacagctaagttaaacatggatcgtacttggatgaaatcaccgcacattagtgaccaatatggtaatggtgttgaacaattcctacaatttacaacccagaatgcaacttctcttcatgggaagtacttctgtccatgtgtgaaatgcttgaatggaagacgacaatcagtcgatgaaattaggacacatcttatctgtgatggcatccttcagagttacactaaatggatatggcatggtgagttgccagacttgcgcacagttgacaacactgcaccggttcatgaagatgctgtagatcgtctagaagacatgttacgtgatcttagagaagaaaattttcaacaagcacttgcacctgtgtacgacaaattagaaagtgattcaaagatcccattgtatgaagattgcacagccttcacacgactttcagcggttttagcgttggtgaacttgaaggcaagatttggatggagtgacaaaagttttacggaattgttatgtttgttgaaaaaaatgcttcccaaagacaacaaattgcccaaaaatcattatgaggcaaaaaagattttatgtcccttgggaatggagtaccaaaaaatacatgcctgccgtaatgattgtgtgttgtatagaaatgaatttgctgatttgaagaattgccccacatgtggtgtatctcgatacaaagcaaatgatgatgaaaacagtaatgattccagcaaaaataatagtcgtccagcaaaagtttgttggtatcttccaatcattccaaggtttaagcgcttgtttgctaacgcagttgacgcaaaaaatcttacttggcatgcacgtggaaggaaagttgatggacttctccaacatccagctgattctccccaatggtcaacaattgatcgtttgtatcctacttttggggacgagccaaggaacctaaggcttggcttagcttcagatggaatgaatccttttggtaaccttagtactaaccacagttcttggcctgtgttgttgatgatctacaacctccctccttggttgtgcataaagcggaagtacattatgttgtgtctaatgatatcgggaccaagacagcctggaaatgatattgatgtgtatcttgcaccgttgattgaagacctaacaacattgtgggtagacggggttgatgtgtttgatgcaaatctacagcagacttttgtcctgcgtgccatggttttttgtacgataaacgacttcccagcatacggtaatttgagtggatacagtgtaaaaggtcaccttgcatgcccgatttgtgagaaacatacatccttcatccaacttaaacatggaaagaagactgtatatacacgacatcggagatttctacacctttatcacccatatcgccgtttgaaaaaggctttttatggaagtcaggagaaagaatctgcaccaaagcctttaagtgggcatgaagttcaccagcgtgttcaggacatcttcactattttcggcaagacccagaagaaagaccctaatgacaaaaacatctggaagaaaaggtcaatttttttttatcttccatactggtctgatcttgatgtaaggcattgtatagacgtaatgcatgttgaaaaaaatgtctgtgatagtttaattggcaccctccttaacattaaagggaagaccaaagataatttgaaaagtcgacaaaatctggtggagatgggtatacgcgagcaattacatccaatttttaaaggtcgtcaaaactatttgcccccagcatgtcacacattgtcaacaaaagagaaaaaaaaattttgccaatgtctgcggagtataaaggttccacaaggatactcttcaaatatcaagagccttgtttccgtcaatgatctcaaattggtggggttgaagtctcatgattgtcatgtgctaatgcaacaaatattgcctgtagcgattcgaggtattttgcctgacaaacttagggtggccataactcggttgtgttttttgtttaatgcgctgtgcaggaaagtaattgacccaacacatttggataatttggagaatgaggcagctatcatcctttgtcaattggaaatgtttttccccccatcgttttttgacattatggtgcacttaattgttcatcttgttagggagatcaggctgtgtggtcctgtgtttttacggtggatgtatccaatagagcggtacatgaaggtattaaagggttataccaagaatcaataccgacctgaggcatccattgttgaaaggtacgttgctgaagaatgtattgaattttgttctgagtacgttgatacatgtaaaccagttgggatcccaacaagttttcatcaccagtcacgtggaggaaagggtacacgagggttcaaggatgtaaccaagactagagaggaggttttagttgctcatttgtatgttttgaataacacacctgaggttttaccatacatagaaactcacaaacaagttctggccgaaactcaccaaaaaatgaacatgatgaaggttttgcaagtacataataagactttcattagctggtttaaggaaaaaaatttcagtgacgagaatgcttcgtcaacattacgactattggctgttggtccaaatttgaatgtaccaacttggaagggctttgatatcaacaattattccttctacactaagtcccaagatgataagagtactgttcagaatagtggggttagtgttgatgctgattccgaacacttttgtggtgcatctgataacaacccaattcgtgcgtccatgccatactttggtgtaattgaagacatctgggaacttgattatagtgcatttcgagtttcgattttcaagtgtaagtgggttaatgtaaatactggtgttcatgaagatcgtatgggttttacattggtagaacttgataaggtcgcctacaaggacgaaccctttatcatggcagagcaagcaaaacaggtgttttacatccaagatccgtgtgactcacgatattcagtggttctacagggacgaacaacaactacacaacataatttaggcgatgatgttgcccttgatatttctgaaatgcctgctttctccaatagaatgccttctataattgaagacccccatgttgatgatgaacatgctaaccgaaatgaccatgaggaaggtttatgggagaagacaaatacataagtggtggttgccaaagtaaagtatttacttgaatataaattttcaacttatttgttttaacattaacttgttttaaaatttgtgggaatatggaataaaaataaatgatgtaattaactttttttttttcagtgatggaatcagcccctacatcccctccacagccagaagatgagcgatctgaattcattagcaagaaaggtaggcaaaccacccgactaagaagccttgtcgtgagaaacaatgagcagcataggctggtggttaatgtaaatcctagaagtgggaaggcatgtgggccaaacaaggaaaaattccatagctatcttggagttgtagcaagagaaaaaatacctattatccattctacttggaacgatgttccagaatcgttgaagaacctgatatgggacgatattatggtaaacttaatacattaaaagttgcaaaaattaaccgttaagtgaacattatatgcttgtgtaatagttggtatgtttgttctattattgcagggaaaatttgtcataccagaagcagaacaagcaaaaaagaaggtattgtcatgggttagcaatagatggagacaattcaagtcttctttaaccactaagtacatatatgctgacacagaaagcgaaacacaacaagaagttgagctgaaatatggtatagatgcacaaacttgggaggcctttgtggctactcgaaaaacaccaagttggcaggtagtatgtgaatttgttgattgctgaactggattacgtgacctgtatgtttgattgtatgtagtcgaataacataatgttgtttacatttcatgataggggataaggaaaaaagcacaggaaattcaaaaatttaatgagtgtccccatgtactatctcgtggtggttatgacttgcttgagaagaagctaatagaagagaaaatcaagaaacggcaacaagatgcaatgaatactgagaatccatcaatggtcgatgaccctccgtctccgatacccaggcatgtcaagtggaagatggcccgcacaaagaaatacgggcaaatgacatctgacaccgcacaacaaatttcagaaaaaattgtgagtgcaaacaacctaagtgtatttttaattgttactctaataacataatatacacttgcaaattgttacgcatgatgatggtaggacgtgttagaagaagagatgacacaaggcagctttaggccacatggtcaagaagacatattaaatactgcgattggccgaccgaagcacccagggcgggttcgtgcagcgggtacaggtgtcaccataagccaatactttggacgtgcatcacgtgcctcaagttcttcatccgcatccgtcaaccccgaacaaatggctgcaatcatagcaaaggtacctaggggggaactaatgtatagttgtcccctgttttgggggtatgctttggatctaaccagacttttggctgtctaattcattttccttatgacttatgctgccataggttttgttatgattgattacttttgtacctctttttgtacgtttctcttctatatatatatataatattatctttgctgatcaaaaaaaaaaaaggtacaagaagaatgccgcaggcaagtcgaggatgaatacaaaaaaagtctcgataggttgaatcagcaatgggaggataagttcaacgaacaagtgaaggaagcagtgaaggttgagttaactcaattggcaacccaagtatcaccaccggttgatgcaaacatacaacaattagttgttcgtgtaagcacaaagggaagttgtgctggaacagctgggaatgtatcaactgaagaaaatccaaacgctgcggggcaaagaatgggattgtacgtaaattggcatgggtctcagaagttagttgcgttcggtcaacttcatagcattccgtccacaattcacaacatgccttatgctgatgatgttgctagcataactgtccaaacagttattgacgggaacgcagaagttccatttcctacatcagaaattaggtatgttaaagacacactgaatacgttcgtggcatggccccaatcattgatgaaaccagtttcagaaaaggtagacaattttgattttttatcaagttcattgcatgtttcccaaattgatagtgtttttcgtcaagttcatgtgtcaataatgtgttttaattgtatttgtatgattctttgaattcttcaaaaaacatatagacagtcggaccagagtccactaaggtgtgtgcagtggaccccttggatgaattgatgaagaacatgtacgaggtataccggaggcctgtcgagttgtgttgggatggaattaagttcggaattgcaaatgtgcagacatcattttttataacattttcagacattaatgaaattatagcaggtgacaaatatttgaacatttgtatacttcagctatggattatgtaagtataggggcgttaagtgtaaggttttgttcttatttgtaatccagccttatgatattctaattctagtaacattttgcattctttggtgacccgtttgaacaggtatctggatcagttgagtacatcacttggttacggtgatgtgtacggattctttgagcctcaaatgatacataatgccagggatagacgtgctgagtgtcaagcgtacattgagttgtgggtaaaggaatcacaaagacaagtataccttggaccttacttgaatcagtaagtatgctgcatttgctcttcggaaattgaaaactgaagttaatttcattgtttgtgttgacaaaaattcagggcccattggcagctttttgtggtatgtccggtgaaacatacagttgtctggttttgttctttgcgtaaaaagcctgacattcacatcaaagctgtaattaacaagtaagttatttagaaattatatatgtaaacattattaagcaaataaatatttgcattacacatgtcatgcattaacccacatgtgttgcctttggtacattagtgtacttaaaactttgaatgctagtgatgatggtaaatgtcatgcagcaggcccaacctggattgaactaaaggttagtaagtagtattaaattgaatcaattaaagttccactgtgaaatacattacgtaccatgacttttgtgcaattgaaacgtcattttgtgtaactatagaccaatgttcaataaggaggcttcgaatgtgggtactacataatgaattggatgtggaacatagttagtggtggtttgaaggatgaatggaccaaggtatattaacttaaatccaatgtggagttagtttcttttcaaactgttatagtaaggcttttaatgaacattgcctggtctgaatacctggttttttttgcagtggtttactgatggaacagccttagatgtggacgacattacaagaataaggcaaaaatgggcagcaagtttattagaatttaagaaacaaccaatgtaggcagattttcatgtactatgatttcgaatgtcggcatattttgatgctgtgatcttttgatcactttttgtggttcccatattcgaatacataaaatatatatatagcaatagtaatttggtcactattgttgcctggtatatttaattttcatcatagtatatatgttgttgttgtgaagttgattgctcaattgtgaactgcaagtgtaacgaacacaattgataacctaagagcacaaatcagccatttgggccatatatggtatgtgttcttttcatttggtgccactcatgcttgtcaaaatgggttacaccgtaatgaggtaatttactgtgattatgtcctacttaatatttgaattttattcgcatgatttcatattttattttataactaaagcatgctttgcaagagaaggaccttcggttccaagaatttgaggatgccaacaaacaggaaaatgaaaaactacagcatgcttgtcaagacatggagcttcagttccaagaaactaaggcagtgttaaatcaggaaggagaggctgccaagactgcggaatcagttcctgaagaacagtttggcagaaagcttaacacttaataacaatgcagaaactgtagcaggaaatttgttgacattgattcagctaagaattattatgttacaatacgctggaatcggtctctgcggacaggttatcacataatttacttgtgtagaaacataattgcattttattcgcatgtagaaactcaagtattgagaaatgagaactatagctgataaacttttggtttttttaatcatgctgcaagcatcaatgtttgtctataacttgctctctttgtgtgatagtgaccctgtgacaaacaacagagaagatggcacctcaactggcactaacccactgttgtcttctatatgtttcttcctattctgcttctctcggttacagaaggtaattccattaacaaatccttactaattcttagttggttatgtaatgtagctagtgaaatacttattgcacagacctgtgattacaactttcttgtcaaaggaccaatttagttggtctgcatcagctacacacaagagccttatgagtcactaagatggatggttgtataatagagttggatgctggtatgtcccaataaaaaaatggatttgctgtcactcatgctcgctattcctatttcttcagcttgtgtttctgaacttgctattgtgtctttctttttgtcattcagatgaactagttatgttgcagctgttgtatgatacatccctgctgttgtattcatattttgaaggagcaaataacaaagaagttaatggaataggtacggtgaaatctcatcataagtatgaccgcattgtcagcaagcaaatggtaggaatatatgtgtctgtttggctgcaaaggaggttgagagggcacattaataacttgaaactttctccagttggagttggtcttatgggctgcatcggaatcaaggtaatgtagtaacgcacgttttcacacttaaaagaaaatggttaacaacgggaactgatatagctagcatttatgactggttgttgggttaaaagagaatggttatatctcatttatggttatttcatgctatgtcttgtaaccatgttgtacctgatatggtatttgaaagtagagagacaagctgttttttgttagtatatcttatatgaaacttcactggtacttatggtactgtttaacttatatatatatatatatatatatatatatatatatatatatccatccttttatagctgattaaaaacaagtataataggaaaaatgttgactttgtatttagttttgactcattttgaaatgaagctttgaagctgtgacaggaaactctctcttggttcttaggaactacccttggttcttatatttgaatttcataattcaaagtggcgaatcttcatcttaacttataatccatttgaattgtcgcattttttgaagtccgaattgtgttcgttttgacttgcgtcaacttgtttctgaaatcggagcatttttgtcgatgagcctttgttgttatatagttgagtcatgtgaatctgattggaacatcaaattgcttcagaattgtgtgctcatggtcacggttaaaatctagatctgattctgattggtgcatcaatatctggaattcttcatctctttattgcttagtaatttccttgtgcctttaattgctgttgccaacactatgtttgtgcaaattcatttcgttggctgattgttatttatgttttaattattgaatccatgttgcttgcagatattgtgagttaaattcctattcggtgcatcttgttttatttgcgtcattactattagatttttatttgtgcttcaattcttgattccatgcttgtgcccagtttcaatggtggtgttgatttctgcagttttgttcttggtgaggtcttgtatttacataccatgtcagtataattgattgactgcccagtagtagttttatacttgtggttagttttgttggaatttttagtttgtaagtaaggaatgcatatataactatgtgagggaataaattccaacaattgttttatggataaaatttaactagacatttggtagaaatgaactccactattattgttttctttctacttgtttatctttgtatattaatatttgcgctgaactgtagaaatgattcttagttgaaatttgaatgaaaattataatgactgagtggacaatctttcaggaagcagttataaaaccaatttggaatacatttactagcagtctcagtggaatttggaagggtgtaggtgctgtgttttctgccatcacagctgaaatggaaccaatggaaatatgtagcaataatgagcatctatatgactgctatactctttctcgcatagaggtagtaccatcagtttcaggtaagtgtacttagtagtgtaatcttttcttagtagtgtcaagactttacctccttcgtgtgtatattctgttttctgccatgccttcctcattgatttgggatggaggaagagtatcctaatgttgtttattatccaaatgaccagcaccatttgatagttcatttatgttgctcccatcatataataaataataaataataaataattatgttttgtaaatttaggacgggtcatattctagaggtcctgtagatattccagtgggtgaatacaatcatacaaagtactatacctcaccaactttcaagttcgaacaagtaagtttggcatgcttcttacaaaataacatatttatagatccttcactggtatcaatgactattaacactggtcatgcatttcttaatttttgaactccctccacccccaagttaacttatgaaaaggaatgttcagctaatatttcaccagcaagagttataatttcttttttgttacaaattctcatatattcccattgcaggatgtggagagaaatcacgcttttggctgcctcaaaaccagtattgcttcaagtctgaagtggcagcaagtggagggtattacaaagaatgggagcaggtgttattgttgcagaaagtctgacctgaattgtttcaattggagcggtcataaattttcagatttattacaaaccgagatacacatgctagtatgtttgatagttaacacaaatggtctctttgtgttataaacctatttgatattttgttcaatttacgaaactcttggtggtttagatacacaagataagcttactcattgttctgatttatagctatttttccctttaatttctccaaatctacttaacttgtcttcaaaaattaacttaaataaaagaatagatatgcatgaatttacatatttctggttgctgttaactttgtatgcacaggatataatatagcatattatgagtggtgtcaatatggtaatatagcattttatggaaataaatcattttgaaatttaaatggtaattaaatgcaaccaagggaaattatggttgaaagaaattatcagctccccaaatttagtacaaataacttgagatttgtattaatttgattagtaactgcaattaacatatatacttggtttgtgttttgaaagattacagaataaattatcaatataattattcagtttaaacagagaaaaacaagaaaaaaataaaaaaaatgaaacattctaagacggttcttaacaggaaccgtcttagaacgcgacaatctacgacggttctttagtaggaaaccgtcttagaacaggctaaaaataaaaaataaaaatcgaatgcaataaactaaggcggttgataaaacgaaaccgtgtttgaaagtatctttctaagacggttgttataataaaaccgtctttgaaagtgactttctaagacggttttttcgttataaccgtcttagaaaataaataaaaaaataataaagttaaactaagacggttgtttacgcataaccgtctttgaaagtagctttctaagacagttgtttcgtgataaccgtcttagaaaataaaaaatacaaaaaaaaattattaaatgaaactaagacggtaaacaaccgtcttagaatgtcactttcaaagacggttatttgctagcaaccgtcttagaaaagtaacataaaacaaaataattaaataaatgaaactaagacggttgttgaaccgttgttgtatgggctaaagaaccgttgtaaaaagtgctttttgtagtaatggaaataaactcagaaatattattcagtactttccctcttgtgttctgtgtttgggatattctggtatagttctgacaggtattggaaaacaacctcaacaaggacaaagacaaatggatagagcttgacatagcaaaggaaaaataccagtgtatcatcgtacgtatacatgaacaataaaatgaaagaatcttattagatacggcactagtctatatattgtcccacataccgtgtgagcacaggaactcgatcaattatatgcccctcgctctacgtacagcacagtacacatatctggtatcacagaaaacaaaaatttaattttcgtgatatcaaaaaatatgaattgaatgcaagttactcaacttgacaaggccaaacatcatgaagttcaaagtagagaaaagaaaaactaatattgattaagaaattattaaagatacaattgaaagagagtttaagctctagttatagaacttatgggagagcctaactatctaactaacaaactaattttcaactcattaatttgcaattaatattctgtaacacgtgaaacctgcaagcaattactggaaaaaaaaaaaaaaaacgcacacatgcatagcactccactacttcacattcacttgcattgcatggtttgtaaatagaaatgaaactagcctaaattgatgcaacctataaagtaagaaaaaggttggagtttgagatcattcgtggaaagaagtttgacaagaagttgcttcaaaggttggagaccactctgaaagtagttagttgtgcttgatgatgttgtaaagaaacaaatcactgactccaatgtcaaggactggctaaatgatctaaaagatgctgtctacgaggccgatgatttagttgataaagcttctgccaaagctgccactaataaaagaaggtaagcaacttttctctggcttttctaatatgaaaattgttagagcataaggagtctttagaatatcttaatcattttttttttgttttcctaacattttttgtgatatgtcatatcactaataaagaatttatacaaaattttgatctaatataataaataataaaaaatttaaaaaaattcacacatttatattttttattaaaacttaattattattccaataaaataattatttccttttttaaaatttttatgaatacaaataataaatatgaataattaaagaaatattaaatatcaattaaaaataatgacaattacataatattgaaaggaaatacttaatagtaaaaaatataattttacatgatatataattaaacatagtaacattagaaaaaacataacaatgaagaaactatgtaagactttttgtaatttctacaatatcatattacactcaaaaaacccatataaaattttattccaatactaaaaaattccaaagtaaaaacttcaaaatattaacatctttatattttttttcagtttttattataacttaaataaaacaaaaagcatcacttatcagtccatcacccattgtttcattccccaaccttccttttgcttcgcaaagtttcattccttcttcctttttccttttttcccaccgtcacttttcttcctttggcttcttcttctttctcattttccttcttagtttcacaaccacccttcgagttataggtatcgctactccctagcataatcatcgttgccccttgagccaccatcgtcacttgatcgcacaaccactgccgctctctcgcgcaaccacaattggtgacaatggaagcagtactccattcacggtcactattcttactctttaatttggttagtattttattctaagttgagattgcatttggtgatttgatttgtttggcaaaaatgcaatttattgtgaaatttcatctctgcgtttgcttcatctattatgaagagctggttcaggggtatacctttattgacagaattagactctcttttcatcagccttaagttgaggattctgacctagctcgatgacccctatgtgaagctctagggtttgttggaatggttggggagtgcagattgccagattctatgaaaataatgattttttattgggaagaaatagttccttatataaggaacgcatcatccgctgaagaaatccacactcccacgtcagttttgctccaacactgaagaacttgaaagaaattgttccttggactaagaaacctaccaagcacctccgatcggagatgctcttagtaagctgaaaggcattgttgttagactagaaaatagaactcaagaagagtcttatgtgaaagaaattgcagtagaacacatcatcgaatgctcactaccaaacggttttttgaaaaaattgtcttaaaaagtaaactttctaaaatgatttttcaaaaaaaaatcatcttaaaatatgttatttaaaaaaaattcatgcacacaaaaacagacttccaatcattagctttgagacggtgaataatgttaagggattagaaaatttttttatttttctaaattttttatatgattttatttaatatttttaaatttttggtatgtattattttatttaatatatttttaatattttttaaatttatttattaattaattaaattaaaaaatatttatagttttataaataaattgaataaaaaacaaattttatcaatattttttaaaaaaaatgacaacttcaaagtcataaaacattttacaattttgaagtcataaaaaattttaagttgtacagttagttgaaaaaaaaattaaactaaaatcgtaaaaaatattatgacttcaattaaaaaagtaaaaaaaaaaatattacaacattaaagtcatatacttttaaaaaattatattgaagtcaaaaaaaattttaccacttctcatggttacgacttctaaataaaaagttgtaacatcaattatgatttttttataaaaatttaaaattcaccccaaataataataaatatatatatatatatatatatatatatatatatatatatatatatatatatatataatcgcttccatgaagcctatttttggcagcactctggaaatttatttcctgtgactatgtaattggatatcagggacaaacttttttaaaacagaaatgtattcaggagacaaacatttacagatgtgcttaaagaataaacaaattttagaaaataaaaaactgtttttaaaaagagtaaacaatcaaggcctaactttctgctttttaatttctcctcttaacatcaaaattataaaaacgcaaccaagacaactttatcccaaactcgcataacattaattaacaattaaattgatcaattgttaaagttaagttataatttgtttttttaatataaagaaacgaatttacgaataatattattttcaaagagtacttacaaacaaaactactgaataaaaatatcaattaatgaataaaaaatgtaatataaatgatgaaaaaatgtgatctaaaatactttaatgaaaaaaagaaaacaaacatatttttgtaaggtctaaaataataacaaaaaatacaaacaaacaaaactaaattataagaaaataaatatttaagcctttattattttatatttaggtggatgctgttggttatgtgtggggcaataacaccaagggaatgaagactgaaaagaacgtgcgtactggtaatagcatattaacagttacacttacactccaatctgattctccgcgttcaactttgattttcttttggtcccctccaaattcctattggcaccgccacgccaccgcacaaggtatacaattttccactacagcgccggcacatcacactggatacattcgatgtttcaattaaatcaattgaaaataaaacagaaaaaatataattctataggaatgaacttattactattatactaacatatatttagtttggaaaattatacccgttcttttatgtcaaaattgttcttgtatatcaaattaatttttgatagggaattacatagatctgataacgtagaaatttgatcaaaatcaatttattaagtacaaattgggtagtcggattaattttagtttaatcccagtcgaatattttcttgtatatggaagaggggggattttaagaaaatagtttaaccaaattacagatttgaataatttttatgtaagaaaatattttcatttttaaaatgttgatgagattattagatttttttttacttgacttttaacatgataaaaatttctaatcttttaaatttttttattttttcatttcaattaaaataattcttaaatgttgttatttctctttttcaatttctaaatttataacacatttaatcactcatatttttctaatttagtaattttgatatatccgtagcatgcatgtcatcaactttttaataaaaactactaacgaggcatgttagtgttgatacacatagtagtccaatagatatgttaactttgcagtgacaatttgacattatgttagaagcccaaaaccgtaaactataaagtataaacaatgtcatcacaaaccataaattatatcatatcatcattaacatgtcagatcaataattctcatttaaagaaattgataacaaaccaacaataaatgaaaattatactaaattttaagacatgaaggtggacggtggaccaagttggaaaaaatattagaaaaaatgaaaaacaaaagttgatttatagaaataaatattttatttttattttctactattttcttttcaatttaaattcaaattttttcttttcttttcactctttttctcttattccaaacatagggtaaaactgaaaaatcattaaattatatttcttcatttcttaattataatacttttaaattaatttgtatcctaaaaaaataattaatttaattaatcatattaatatatcaattagttatattatcattttaaaattattattttcttattttattatctacttaattgttttcatcaatgtttaaaaagagaatagttaagtaaaaatatataggaaaaaataattaacgcatctaaaaattagaaaataatcttataaaatggaacaaacaaatttttaagagggtcttataattagagacgaaaaaattacaaatcaaaagtagatttaagcctgaatacaatttttattgtatattaaacataaaaaaaactaatattcctaactttaaatgtttacttcaaaactaaacatgttcccacaataaacactaaaaaaataggtattctgagaatattttttagttgattaattttattatatatatatatatatatatattgatgggacatgaaaattaaactcacatagacacatatcatgtcgttaataaacaataaaaaatacttttaacaaatattctttcatcctaaaataaatatcatttaaaaaatctaaaaaaataattatgttaacttttcaatatataatattgattattttttcattaataactaaagatattcgtatgtatggatcaatccatgacccaatccaatccaattatattgggttggttttttaagaattatggtcgaactcaaccaacctaatcatatacaagttggataataaattttatttatttaattcaatccaatctgactcaatctatatcatataattaaatttattattaaatataaaaacacattaatttttagctcatatagtttaattaaatcacctatgattttttttcttttttaagttgttgattatatctagattttgtttatatttctcatactaatacaatattttatttctatataaaataaaaatatcaaattaacattgaaattattaattctttagtcaaaatgttgtcataatttggtatatttaatctacaaagctttagacaaaaacaaattattatctaaaaaactttagtttttacaaaataaaaatatttttaaatattgagtttcggttaatccaaactgacctaactcatttatgatcgagttaggttgggtcgagcatgtagaaaaattgcacaaatccaacctcactcaaaaaaaattggatcgggtaataagtttagccaaacccgacccaaattcaattcgagaatatccctaattaatatctttattctttaataagtttgctttagtttttcaatgtgttattaatattattctcttttatttatttaacaaggttaatttatgaaaagaatctatttattattttttcttaatctacataaaacaacgaacgatatttattttggaacaaaaagaaataaaaataaaaatgctaaaaagaaaatgctaatcaacatccctaaaacattgattaaagaactaaaagagaaaatgcttttattgaaattttcaatattgttacttgttacggatacggatattccatctccgtatccttcccttaattagccccatcaaccggggtctgtccttgattacgaaggagtgatcatcgaccacattaaaagcacggcggccatcattccctgattctcggcctaggcattatggaggaggatcccgagaattgaatgctctgccccaagcccagataagaccctataaaaccagcatactcaatggtgaaaggtacacacagattactcttactctccctctttccattcacacggcacacatagcaccccaattgctcttgtgtcggtgtgatcttctcttcagacgctggtcttaccaccatagatcagcaggggagagtccgatcctatagcaacactcccggtgacacttgtcgggcatttccgtcattcaagaacggaacattggcgtcgtctgtgggaacgataaaattcgaatcccacctaccagcaatggcaaacaccaaaagacatcacgcaggaaggaatggagagccacccaggatcgtgcaacaggaagatgtagtggtggaagatgccctctcacacacggcttcgtccagaacacaacccacaccaggaagccgaacacaacacctctcaacgcttcatccagaacgctctccaagccttgctgaccaggatggaaaacttggagaaacgctatgaacttcagcggcaagaggacatgcaactcctcatcgcccagttaaaagaacgcgacgacagacgaaaggaaaaagagcgacgttagaacgccgaccaagtccagagtcgggacaggctcgagacattctgaaggccgagatcagcggcgtcggctcataccgatggaacgggggatgaaaacaggactgaacgagaaagagggctctgatctcataaggcacccccaatgtcctcagccgtcgcaccagacccagtcgcaggcagaccaacaagggatatcgcccattccccgggtcggaataaggaaacctaccgaaggaaataccgcaggggccatcagaacaatagcccattcgtcgaccagatagtcgatgcccagtacttggaagatttcgacgggtcgttcctgtcgaaatacgacggcagccaggacccgcaagtgcacatcgacgagtttgacatgcagatgtgcgtgagaggcatcgacgagcccatcatctcgatgatttttgccaccacgctaacaggagccgccagacatggtttcattcactacctccccgatctatatacaactttgaggacttcggccagaaattcctgctgaactttgcgacgagcaaaaaacagccgaagtctgagttcgctttagggaagataagacagggagcgggggaaacgctacagaactacctggaccgattcaaggaagctgcactgcaagtctagggcttggaagagaaggtacacgtccatttgatctccgcaggccttaacagggcatcccgcctcgctaagtcgatatataaagatccagtgaagtccttgaacgaattcagaatgcggtcaaaaaagtacctcgaactagagcaaatggaaatagcaaattcagtgccgaaagaaagtaggagaccctcaccgcccagaggacgacgtcacgagaaacaacagctgggacagagtaatcggcaaccaaccaacgcccatggcggccgaccatcacggatgaatgccgatcctcagttcaggccggggaggtataaactaaagtacgataagtatacatcattaacaaccccacgaggacagatctggcaagaagtagcgttcaccgacatgagaaaggtcaaccggccacccccgatggtaaaaagggaaggcgtagattattcccgatattgtgacttccataacggcccagggcacacgaccgatcagtgttggaaacttcgagacgccatagaaaaatttatacgagaaggcaagttgcgacaatatgtcatccagacccaaggacggcagaatgagaggaaggcaccactggagaataaacgagaagacaagaggaacagaaaggaggagttccccgaaccggaattcaaatgcaatgtcatcaccgggggactaggtggaggaggtgactcggccaaccaaaggaagaagtacctcagagaagtaatgtcagtgagggaaaaaccgcagtttaagggaagatcaaaggagggggtcaggaaagctgaaactccattaatatatttcaccgatgaagatatgcagggagtagtgccagggcacgaagacggattagtcataaccggaaccgtggccaatttcagagtcaagaggatctacgtcgataacggcagctcggccaacatcatcaatctggacgcattcagaagaatgaacctgaaggaggaagacttaagaccatgtcaaaccatgctttatgggttcaatggctcgggcaccagcttgaagggagtaatcgacctccaacttacgttgggaacaaaagaaggattcaggtcagaaagggtggcattcacagtggccgactttccgtcccaatataacatcatcctgggaaggccgacgctacacaagtgggacgtctttgtatccactaagcaccaaaaaataaagatgatcggccatttgggcaaggtcatcaccatttgtggagatcagaaggagtcacggcaatgttattacaacactgtgagagaatctgaagccggactgccctccccaccgcatcctcggcgaggggagccgatgaaagctttccatgagaaccacccaagaaagccgatcaacatgatcgaactagacttacgggacgtcgaagaatggagaccgaaaccagccgatgaactcaccaacatccagatcggcccccaccccgagcagatcacgaagataagtaaacaaggagaccccaaattcaaggaacgactgatccgatgtctaaaggagaatcaggacgtcttcgcctggaaagcatctcaaattctaggaatcaagccgaacttctgctgccataaacttgcgatacacccaggatctaagccagtggagcagaagagcaggaagctcggccaagacaggaggcaggctctggagaagcacatcgaagaattggtcgaagccggcttcataagagagattcaatacacgacctggctctcaaatgtcgtgatggtaagaaaatctaatgggaagtggagagtgtgcgtcgattataccgatctaaataaagtctgcccgaaggattcatacccaatgccgaatatcgatcagctggtagacagctcagcagggtacctctggctgtcatttatggatgcttattccgagcataatcaaattcccatgcacccgaccgatcaggagaagacaacattccggggcatcaaagcaaactattgctacaaggtcatgcctttcggcctaaagaatgtgggagccacataccaacggatgatgaataaggttttttgtgaccagatcggaagaaacattgaggtctacattgacgacatgatcacaaaaacatccacagtaggagatcatgtccaagacttagaagaaacattccaaaaattgagacaacacgatatacgcctcaacccgctgaaatgcacgtttggagtcagagtgggaaagttcctgggctttatgttaactcatcggggaggctaacccggacaaatgcagggccatcctggacatgcagttcccatccaacaaaaaagaagtacagctgctgaccgggaggatggcggccctaacccgatttttacccaagtcggcagaaaaggtttacctttctttaagctattaaagaaggaagcaacgataggatggagtccaatatgtgaagatgccttccagaagatcaaagcatgtttaaccacaccaccgatactgtcgaaacccgagccaggcgagacactcatactgtacctatcggtaggcgaagaagctatcagtgcggtactggtcagagaggaaggcaaaactcaatggccgatatacttcatcagccgcgctttaaaaaattcggaactaaggtatcagaagctcgaaaaagtcgcttttgccctgctcattgcggccaaacggctccgaccatacttccaaagtcatacggtagtcgtccggacgaatcagccgatccgacaagtactgcataaaccggatttagcaggaaggatgatgaattgggcaatccagttatccgaatatgacatcaaatatgaagcacgacaggccattaagtcctaggcgttggccgatttcgtcatggagttgacaccgacgacatctggccagcctaatcagatatggaaagtatacgtcgacggatcgtccaatgccaaaggaagcggagccggggtcatcatcgaaaatccggagggcgtagcactggagcaatcgttacaactcaacttcccgacctctaacaaccaggcagaatacgaggcattaatcgccgggttactacaggcgaaagagcagggagcatccagagtcaacgttttcaccgattcgcagcttgtagccgcacaaattgagggcagatatcagactaaaggatccctattggccaaatacctgataagagtcaaggagatcatggcagaattcgaggaggtggtggtcgcccacattccaagagaagagaacgtaagggccgacatattatctaaattagcaagcaccaaaggaaccacaagccatagatcagtcattcagcaagaagtctcctggccgacgtgcgtcatggccatctcaagtgacgacgattggaggcgaccattgattaactatttggaacacgggacagtaccagacgacggtatggaggcaaagaaattggctaggaatgttgcactatacgtggtaataaacggcgaactatatagacgaggcctccacaccccgttattgctatgtttaaggtccgaacaagtcgattacgtcctcaccgagatacacgaagggatcaatggccagcatatgggagcaagagcactagcgttgaaggctatacgtgcaggatatttttggccgacgatgagggcagacacggaggatcatgtgagaagatgtgacaattgtcagaaacacgcgaagacaatacaagctcccccatcggagctcggcctgatcacggctccatggccattctacaaatggggcatagaccttttaggaccattcaaagcggcagaaggacagatgaagtggctgattgtggccgtcgactatttcacaaaatgggtcgaggtcgaacccctctccacaattacctcagctcgcgtacaaaaatttatggagagaaacataatctccagatttggaatcccggcagagattgtaacggataatggaacccaattcaccgactgcagattcaaggcgatgatagcaggcctacaaataaaacaccactttgcgtccgtcgaacacccgcagtccaatggccaggccgaagcggccaataaaataattctagacggactaaagaaaagaatgaatgcagcaggaccgaattgggtggagcagttatattacgtcctataggcatatcggacgacagtacagacatccacacaagaaaccccgttcagaatgacatacgggtgcgacaccatgataccagtagagttggccaactgtcctggaggaggcggcacatggagcgggccaacgacaactataaagcattggcgaccgagctagacatgatagaggagatccgtgaggcgacgcacaaccgagacctacttaacaaaagcagagtagcgaaaaggttcaataagaaggtaaggccacgatcctttgaagaaggtgacctcgtgctccgacgagctgacatcgggaacaagaacgctcgagatggcaaactagcagcaaactgggaaggaccttaccgagtcaataaaaatattggccaaggagcttatgccttagagacactggagggacagtcgatccgacgaacctggaacaccgacaagttgaaaaaatactacagctgatacccatgtgtttccccttagcaggcccccggcctgtcattgggatcatggacgacacgtgtttctctttaattggccgacgcgcccatcatagggatcgtgtattatcacctcaccggatttcgggaggatgtcaacagatgtatctcggttctcatcggtcgatccggggaagtacaactcggaaatagtcgacctgagagatagtgaaaatcttgttttcttcaaagaatatgaataaaatcccgatagggagcttatatttatacatcgcctctgcatgcaaagctgattagacatttatgcacaatttctacatgtaaaatcaattatctaagttaaatcaaggtggctatcccctaatcggaatcctaaaagtcgaaatgaaggattacgatgcttagccgttggaaccataagcatcgattaacagggaacgtcggtaacacaaccctaaaagtctaaagtgacggattagggaactcggggctaaaataacggattaggataatcggccgttcaaaccacgatgtcaactaaagcgacataaccttaaacttacatcggtcgttcgagccacaaaagcagaataaaaacgatatcaataccacaactagttatataaagaaaaaaataaatacttgtccgaacaaacaaaatgtcaggaatttacaaggaaaaccggcataccggcccttcaattatccttctcaaccggagaaccatcactgggaaccccgccactaggaacaccaccatcggaagcactgccatcgggaatctcgtctgaaacaccctcatcctcttcactgtcagaaagtttaaggagttggccattactgacgtaggctctgaagtgcataccctcggtgttaagtttcacccaggggttcaagaagtagagctgactcagagcattgtaaaaagaggcctccgaggatttcttaagctgatctcggacaaacgaaagttcttgcgtagcctcctcatactcccgagttttcttggtgttaagggcgagtaactcgtcgtacgaggatttgcttctgtcggcccttttttgaaccctccgcagagtatcctccagtctggtgatggcggccttagaagtcctgatctcccgttccaaagccttagcctgagttcgggaaatatccaaatcggtcgtcatcttggccaccgactcacgagaagcttcgaaatcggcagtcaccttcgccagcgattcctgggattccttgagttcggcgaccaaccgggcaaccgacgcttgcgcttccccagcctcaacccgagcggcttccaacgcttcagccgacttggttgcctcggcacaagacgactccaattctcgccgaagacgctcgacctcggcctcagaagtctcaacccgtaatgccaacttggaagctttcagatttaaagaagacaaactcccaagcagcgaacccgtcttgaagcaggccgactgcaaggcattcagctcctccaattccggatcagagaaaacgatcgggtctgaatacctcttaggcgcccggaggacttcaaaaagatccatagtcataccccagtcccagagggtgcgaggagacaggtgaatacgacctccagacgattcagccgcagtagaaacaagggcagtcggcaaagtgagggaccccggagtatcggcaggatcggaggcggaaggggacagagtatccccttgaacgaccccggtgacaggggcaggagcacccgtagtagcaagaactttggaaacctccccgaccgggctatcagtaatcacgacggtggcgggcgggggggaggctggaggagtcagagcagtaaccggggtcggatcctcggggatagaaaccggcctggcaggaattgaaatcgaagcaggatcagaagaaatccatccttttcggtcggcagcctctttgcccgaacgactggcctgtacagagaagaaatagaaaaataaggggcagctacaagaaaccccgagttgttgacaaagcatctcgaaggcaagcatgaaagcccagctattgggatgaagttgggtaggagagacgtgcagataatctaacacctgcatttggaagtcagacaaaggaagtcggattcccaccctagtgatcacttcactataaaataggaaaaagggaggaccgtcacccccttgggaaacacaaacgggaacgcccgagtcagacggacggatatggaaatcttcagaaactccgaggggcagttgggcgaggtcgtcgggggaaagcaccgacgagtattctaaaacctcgtgggcaacccagggaaacctatcagataaaacagaaaggacgggacgagatccgattgccgaatcattgacattgccgatatcagaatccatgattacctacaaggaaaatagagcagttagaaggatacctggggggcgagtcaacaagggttgaggaaagggcaaagcctgaactggcacagccaccgatggacgggcacctaaagtggggaccgactcacggacaggcatcggcaccctaacagggttgtgtcggcatctatctagaaggtcatcggcttgcctatccaaatccctgctgattagatagaaaaattcgtccaaacactttgaacaaggttcatagcggatgtcaaactggggctgtacctctaggatggctccagaaacgaggggggcggaagcagaaagtttaggggtcatccccaccttcggtgcagatagagcaggaccatgacgcgaagaggaccctaaggatccccgaggagagttattggaggtacttgtgaaagggggcctaggggcacgaaggacgggaaccctaggggcattaggggcactaggggcattaatggcagggggtacccgaaggaaggccttttccttctcttcatcaggaagaggaagcccaaaaagccagaaggcagtacgaggaggatacatccggcggatttctgcctcttcctccggagtatacttcattataagaaaaaggaagaaggctgaaccaaagcagggggaaaaggaggtttgcagacaacaaggcaaatagacgcaaaaggacaaaaaatcctatcaatccaggaaaatggccaagacaaaggagaaaccaacaaaggataaaaaggaaatagtagagcaagaggaagaacagtgaaaggagttacctggagagaaaatggtgaagtcggaggcacaaatggcagcaaagagcaagggtgcaggcactcgagaagactcgcaaaggaaaaggacaaggaaattaatgaacaataggaaacggggaggcaagagatcgaaaggtcagataagtatggcacacaaaggaaaagaaaccgtcagaattcaaaaacgcgaggcaataactgacggacattgaaagacgtgggagtgacggttacgtcataactgcaccaaagtaatgattaaagcatgaaacgacagaagacacgtggcgcctcgggattaagggacgcttcattactcaaaatcggctgactctaaagagacagggtcggcccgacaccaggataaaagatggccgaaaagcacaggatggatgataatgtcggcccagaattcccgtatgaggccgactcacggataataccgactagatgtcagaatcataaccgatagatcacacgcttcgcacgatgtcggcccttcctgagatcggccaggactcaattaaaccggacaagagcaagcagaaagttgatcacgtcattttacatcccggccctccagaatactggataaccaggatgaggggcatctgttacggatacggatattccatctccgtatccttcccttaattagccccatcaaccggggtctgtccttgattacgaaggagttatcatcgaccacattaaaagcacggcggccatcattccctgattctcggcctaggcattatggaggaggatcctgagaattgaatgctctgccccaagcccagataagaccctataaaaccagcatactcaatggtgaaaggtacacacagattactcttactctccctctttccattcacacggcacacacagcaccccaattgctcctgtgtcggtgtgatcttctcttcaacgctggtcttaccaccatagatcagcaggggagagtccgatcctatagcaacactcccggtgacacttgtcgggcatttccgtcattcaaaaacggaacattactcataattttttttatgctctcatttgatttacactatttttttaaaatttcttaattattatctcaagaatactaatcagcaagacttatgttaaaaaggagtactacataggaataaatctaaggaggacaagcacgcgacttaccacccctctttggaatctttgtgtgtgtctatatatatatatatatacatgaagaaaaattaaaaattaaaatatcaataaaagaaaatatataagataaataagtttttgagttaatatttgtataaacaaattagtaatagactatatctctaactttatctatataattaataataaataatttttaaatttattatttattagaaattaaatatataaattaattatgcaaaaaagatccaatccctttaatacaatccttttattcctttatccatcgaattaaatatatataaataattatgtaaagaagagtaaattataatattcatctacatggtttgcttttattatatttaatatctatgttttttaaatcatacaaaaacatcttaagttgatttttcatttcactaaccactatttgatgttttaactgttagtttaagactctcacacgaggaacacatgattttaaataaaatttctttgtctaaaatacttttattagttttttttaacttgcttacacattatttttaataaatttttttgtataaaatatttttatttgtttcttttaactttgcaattatgactatcaaggccaattgtgtaaaatatttcaccttaaattttaataaattgaatccagatttaaagtccaattaaataaattaaaaaaattacatgcgattgaatattaaaatagatgctgacaaaattttttgtcactatttaatcttcattttcttttacctttggttttcttttataaatgaatgtatttttttcttttattaattttagtaatagaagtttcacaaaattaataaatgaggttaaaaataatataaaaaatgataaatataataaaatccgacctccctttgatacaatcctgatccgtctctaccacgtaagaaagatttgtatgtctgtccattggtattaccaaatagaaacaacatgtgagagacgtgtgagttcagagtcccaaggaagatgccacgcgtcccactagatttgtcttgttgtatgaaagaatgtcagtacctttctcaaaggccttacttttttgggtcatttatggggagacagggtagacgtaatccctcaatcttactgatagcgcacaaccatcgggaacgttccaattttttgcattgcatttctcaaactcaaactgcactaagctgtaaactaccccaagatttaattttatttctctctagtttcgtttttttccgagaaacaatacggtttattttcttattataaaatatatttaaaacatggattaaggaagagatattatgtgcagattaaatatgtgaatatgtttcgtgaatcaaataaagaaaataaaataatattcttttaactttgaatcgtatcgtttttattaaatatgtgaatagattatcatttcagtctatgtgatatattttcatagtattttatgaaattagaaactgtcaaataagtatcgtttttattaaatatgtgaataaattatcatttcagtctttgtgatatattttcatagtattttatgaaattagaactttcaaataaattcataaaattaaaatcactatcattttagtccttaacatatataatttattattattgtagttttaaaatttaatcattcacgattattatattttataacagaactaacgacaaaacagacatgattaggaaaattaaattttaatgatttatttaatatttttgtaatttcattttttaaaccggaatgtatttagaatttttatttgatacttaactaatattcctccaactaaattgatccattttaattatcatttttcttcttctaatttcataaagtattatgatcatttcttataatttcaaaagactaaaatgatagcttaatcttaaatgtgtacatactagtatcttatgttatatatgttctttttttttcttcagaaatgccaataatgtattttctaacatactttttagttcattaaaaaaaacacactttttagtttttattatggttaaaatttagtgaccatcacaaatgtatttgagtttttcatcttatttaatgtaatatattaaaaatgattttaattttttttactaattcttcccaataaatatttaacattcctttcgatttatatgtataatatccaaatttgaattgatatttgcaatatactaatattcctttcgtttaacattcatacaatttttttcttttcattttctaatgtaatatatatgtataatgataaattattcttataatttgaatatcataaaattattaattcataataaaaatttaatatataatttttttataacttaaaatatttggatccttcacgaaattttgatacatcataaaggcttttatcttacattttttaacttatagcattattttacgttttattcatgaagaaagtagcataaaatgctaatagctaattaatgctcagtacacaaagattaagttaccaacaaaggttggtttattggcggataatacatataaatacttttataagagttttttgagtttatctttaagtctgattttggtgagtacctagatttaatttatctaaatttttctataacaaaaaattcaaaattaagttaataaatgaaagttatatttgtacatattttttattcataagaattgaacattatatcagatgatttaccattctcaagtatttacataatcaattgaattaaactctcttgatatatttttatataactaccttaaatgcattaattatcaaatgaaaaatctacgtgattgcttccaaaattccgaagcaaaagatccttttttttttttttatcagaaagcaaatgatcctatcatataataacaactttctcatttctggtaaaaaaaacaaacacacacaaaaaaattctgatcatttatggggcatgttgatgtgctgattatacggtcgtacaacaccgacaagcatgtaatagaacgtgagaagattaatcactcgcataaacaaacaaaaaacaaagattaaatcaagctaacaccaaaccagacgtatccaatgtcaattcaaaacgatcatttgctaaaaatatgatatcaatattgagtataagaaataattaccgtaccgaaagggggtgtatatagggtattaggattattcagaagacaacgacacactaaaccttgatttatgccactcattaaaatttaaaccgtgaggacaaggtcattaagttacttctaaaattacgtgaattatatgcattgatagagtccacttaactatatatattaaattctatccaaaaatggagttggcacgttgcccgtcttttttcagttttgttattttgttcttttctttgaacttagtgatcatgaacttttattttcatgcatgtatatctctacagtttacttgatttcccattatcgtacgtttttgggtgtacatcataaaggaccactagttatcttacgtttcagcgatgaagaatgtacgtaataacataacgtttttattaggagataacataataacttgttaatgttcaatatatagattaaaattaagtttgtgttttcatgaaccttaaaattaagccagttgatgaattagttaaagttacttctttcaataaaattattctaaaaatattataattaaagttacttctatcaataatttttcaattatgcttttactatttttggtataaatctatcatatataaaaaagaataaagtaacatttttataattatttattatttataaaaacaaaaaaaatcaaaaaaacataattaaatatacttttagtccatcaaatatgtggtctgattttgtggcattctagacccatacccatttactaaatatgcttttagtctgtcaaatctaagaatctgtcttctttagtctcacaaatttgcaaaaatatttttttagtctattttgcagtaaaaaatcatcacaaattgtgcattaaaattgctaaaaattagttaggagaaaataattaaaaaaaatatttcacgaatttgatggactaaaagctgcaaattttaattaagaaattaaaaatataaccttaaatttaaagaataaaaaataaatatatttaagtctattaaataaatcacttatgtgttatgagtaatatttttacgattttttcattacaatcgccatcctagtgtcactaccattttggacatgaacacttttttattgtgggtcatggaaaccaaattcaaccaaatggttcgacatctcccaattggttatgtatcaatcccgtattgcaataaaaaaaatcatggttaaattagtttaagcagaattagttaaataattgagaagcctttattttgcgaaatcttgttggattttcgaaaaatgtaaagatgagaatatgttttcttatatttgttagaaggtaataaacaaagatttcatgatatattttattctaaggaaatgagattttcatgttcattttatttttttgttaatttgattttcatgaagagaggatgagaatgtagattttgtatgatgagaatctgattattatatataaattctattataccttccctactaatatttgttattctactacttttctactcacctaccaattctattattggtatagttaaccaaactattttaaatatttccaaaaaaaaatatttagtaatataagatatatttaatatttttaaagaaaaaataatgtaaatcaaacatgttttaaatattttaaaaaaatataaaaaaaaggttcacaaaaattaatcaaacacatttttctcaaaacaatcactactagaaatattacatttaacatcattatattaacattgatatttttaaaaaaccgatgttaacgaaaacacgatgacaattttgtgaattttgctactctcccttatctaacacaaatgacaatgtaaaaatgttttacactgtcaatgcatagatattatactctttaaaatgattattttaaagtaattcaaacgataatatgtgatcggttgatagtgtaaaatcaacgttaacacttaatcttaaaaatttattaaattgtgcaccttccattattgggagctagtcaagtatcatgcgtcttgaatgggtattgaactattttctttatttttaaaactaacaaaattatcatacatgataggttgtgtgtaatgtctctgaatgtcaacttctctgttactcacatgctatgatactttacatggtgacatttcatacaaatttcttgttggtcataacccccaatcggttagaaccttctataggtagtcctttctaagatgtcgacaatctactttggctactttgaggagtaatgactgttcttacaaacgaacacgagacttttcaacatgttttgtcctcactcatacgttttctaggaaattttccaaaaggacatccatcccataactactccaagctaaacacacttctttgtagagttcttaagtgataaattgccaaaagtatatgcattttgttggtataaatagtattaattaattcctttaagtttttgtcaactttacagtctcatatctaaacagtctctgaatccctttcttttcgatgtgattcgttgagatgttacattgtaattagatgagtttgtaaaactttttatactatcggtgattttttgttcttctgtaattaaattaaaaaattatagataatatttgatatgtatcactaaaataaaagatttacaaataaaagtaaaaaattgtgaaataaatttgtgaatatttataaaatgtttgcttacacattattttgaaatgctaatttttaatgaatttatttttaatataagagattgtattaatacttatttaaaatttcacaaaggaatctagcttagttgattaaataagatgtacaagtattgtaaatctcttataataatgttttaattctttcatatcaaacaaaaaattggcaattgcttcctatacttcccgaattatttcatatacttctcatgttcaactaaatgagttagatcttcttaatataatcgatagttgcttataaaactacttttataagactataaaaacttatttgttctaatagaaatctcaatttgcttaattgtaactgtattaggatttttttttaacagaactgcattggaattaatcaagctcaaaggaaatgtacaaaaaaaaaaatcaaggtcaaaagaaattattaattacaagaacaaattaatcaattattattgttattttaaaactcatttaataagaaagaaatcatcaattaaaaacacattttttacataattacaaagactgaataattaattagttaccataattttcgaaactaatttactactatatttgatatcttatagtatcttattattataaaaaaaaagtcaaaccttgaccacaagaacaataatttattagccaagtaaattattccctccatctaaaaaaacaagtgtaattctaattataagttttatgagttaagaaaaattaataaataaataataataattttataaaactaactttaatattaatattatattaaaaaattaaagtgatatttattataagtattattaaaaaattaatattatattgaaaagttaaatacaataattattaatgtctaattcaattaattaaataagatacataaaatgactaatattcattcttacaaatgaaaaatataatataaaataagatcattgtaaaatcggaaagaaagaaaagaaaaaaaaaagagtctaattcagggtctatttgaatgtaagtttctctaaaaatacttttaaaagaagaaaataaaaagaaataaatgaaataaatttttctataaactaaaataagtttttcattagctcatatgtagatgtcatttaatcttttagagaaattgtacttgataaatttctcaaaattagttaataaaaaatttatttttatttataaaaaattaattttatttatttttattttcctttaaaaatccttttaaagaaagttagtcaaacaattatttcagtgacgatgaaaaatgaactgatgaaaaatgaactcaaataaatccaaatggcaaatgaatccgaacacggccgaatcacccaaccccaattatgatgtatataaaggagacatcagaaagaaaatccgagatcccagattggcacattatttaacgttgccactcccttcaatttcggccaccctcaaaccttttccatccaacaaaaagaacctgaagaaaaagaaaaccctctctccgcaaaaacaacaacacaaacacaaatccacaaaagctctctcattagtcattagtcattactcatccatcattcattccccagaaaccgcaacctcaaacaacacaacaacaaaatataacatttcccgttacccgatccgacgtcgttttggcattccgttagcggcgccagcatgtcgtccggcggccccaccacgacctcctccaacaccagcccaagggtcgccgcgggccccaccaccactcgccgtcgcgtcgctgacaacatcaccaacatcgtagacgccgaaaaacagcagcaacagcaagtcacctcaagcttctccgatttctccgaggtcgaaaccgatgagaatgtcccccaccacgcccacgcgcatcaccaccacgtgcatcccgtcacgcgcttcctcctcctccgcgcgcgaatcctcctctgcgttcccgagtccttcttccagcgcgtcgagcacctcgtcctctggctcgccggttccgtccagagcctccgctccggtaaacacgtcggccgaaaaatcatcctcgccctcattttcatgctcgtcatgtccgtcttcctcaaggttttcatttcatttctcgccacaaactattttttctttgttttcctattgaaagaaaaaaaaaaaatcaagtcccacattgttcagttatcataaggacccattgttcagttatcataaggacctcacctatgataaagcttttgccattgaattatgatcaaaccacattctaatatgttattgagtctatcctaaatttattgcaaatggcctcatccattatccattattgaaaatgtctattttattgtgttcctcaaggtttcgcttctcggaacgggcgttgagatgaaagggaagagcttcaagagcatcgaaaatggacaattgatattgcagcggttcaaggaggattgggtttcggcccagagggttgtctccgaggccaggaccagaacccaaacctcgatgcccaaacgcgtcctcgagaggctcacggtaagtcgctccgcaaacacgtttttcctccctttttttatttatttatcaaaaaagcgctttttcttacttttggttttttcttcctttccttctcgtaattgatcttgaaaattcctttttgggtatccgctttttttttttaaccccttttgcctctttttcttcttctttctggggtgaaaaaaagtatagggatgatgatgaatgaatagaaaaggttaatttgtggaaaaggttaaaatgtgttgatttgtttttcctggtgattgggtgaataaaattattgttttcattatagttatttatttactttattgcttttgtaattgcactttttgattttttatttgcgatttccatctatcctcactattttaacgttacaatttttatttatctgtaataaaatattcacatgatactttattatacatgattggttatttatttattaagtatttggtttccatatatatatccacgtaatttttacactttagttccccacttgaaaactattcattttagcatttatacatatacattttaatctatgttagtttttcatctaaaattataggaattaagacggtttaagaaaaaaaagagttaaaagtgtgtatgcatagaattagagactaatatgtaggactagaatataaaaaattatgcaagtgtaaatactatgtgagtaattaaatctttttattaaatgttgaagtttgaagtaaaagataaaacaaaattacacaatgtaattaaaatatgttttttttatagttttgctgggatgagggtgctcagatgctcgaataaaaatttgtaggtgaaggtgtagtgtgatttgactaataacttattttcaatcttatttagaatattgattaattaaaaaattgtaaaaatggcggaaagtggtgaagcatgaacgatttgagtgccaaaatgttagatatgaaactgggtgtgaaaagatttgttttcgtcgtgaggttgaaatgcctcacatgattggaatttgaactcattttgttcaaatgttgacttgttgcatcacttgcattacatgtaaacgctggctactggagacacgtgtaactgtgttcaatgtttggtactgagaagttggctctgaccgtaacactactatgtttgatatgcattttgtgatttctcacgcgtttcgtttgatttttcttttccttagtgcttttcatgtatgtgatatagcaacttaaagtatcttggatctagttctcacttggttgagcaaaatatatttccttgatatttgtcttcgattctcatgaaaaaaaaatatagcaggttaagttatcgttggtgttgaattgttataattaaatgtgtttaaatagttttaactgctaaagtactaaaattgagaattacttgaccaatttgagttttgggaccatgcttttaataattttagatagttcaacacttttccttgtggctttatctttatttttattttactttctcatcatgttttgcttatttattgtttttctttttcaatagactccagaaatatggatgaagccaaacagtgacaaatattacaaatgcgtttctcctcccaggaatgtaataagtatgtgtgcaattgcacttgattagtctcaagcttctctgtgagtaatcaacttttgtctcacttgtcattccgtctttatttttcttcatttttttcagggccaaaacagacaaatggctatcttcttgttcatgcgaatggtggattgaatcaaatgagaactggggtaagataagatcaaatgacatataggattatgtatatgaatctcatttccaagtttcttgaatgatatttatgagtttaatggtaatacacttacagagtaaaattaaatcacaaatcaccgttgatataaattttaaaataatttcgtaaaaacaacaaacttaccatactctgtagtgtgattggatgaatgtgaaatagtcttacactattaatctgttagtgcataaccctttttttctctatttctgtttactaattcctagaatcctcatcgacttgcagatatgtgatatggttgcagtggcaaaaataatgaatgccacccttgtccttccttctctagaccatgattcattttggactgatccaaggtaaaatttcgcatttaaattgaatgtaactttaattattatcttctcatgttaccctttttccaaaatataatgtccctgacatatttcagtgactttaaagatatctttgactggagacacttcatgaaagttttgaaagacgacattgagatagttgagtacttgccggtccagtatgcctcgctgaaacctcttgtgaaggcccctgtttcctggtcaaaggtgtgaagcattaaacaattctattggacaacattgaaacaattattctgctgtttcttagtgcaataggcttttatgcttcatttgcaggccagttactacagaggtgagattcttccattgttgaagcgacatacggttgtacagtttactcacacggattcccggctcgccaacaatggccttgcttcctctatacagaagctgaggtgccgtgccaattaccatgctctaaagtacacggcagaaattgaagagcttggaagggtcttggtgaataggctaagaaacaacaaagaaccatacattgcccttcatttaaggtattgtcttgtggacttaaatttctttggttacttttatatactgctttgtttgcataaacttctccataagcacttacacgaaaagaaaataaaaagacaaaatgaattgagcttctcccataaaccaaaatcaacttatctattttagtttttggagaagttagatggtagagcttctttaaaagttaagtgcataagttgactttagtttatgaatgaagtccaatacattttaccttctttttttttcttctataagtgattatagagaagtttatccaaacaaaacctttaatataatagtttttcttatgttatattttgtttatttgcaatatagatatgagaaagacatgctatcctttactggctgcagtcacaatctcactgctgaggaggctgaggaacttagggttatgaggtatgaagtgaagcattggaaggaaaaagagattgatagtgtggatagaagattacaaggggggtgccctatgtcacctagagaggcagctgtttttctcaaggccatggggtacccttccactacaacaatctacattgttgcaggacctatttatggtgtcaatagtttggaagcctttcaatctatgttccctaatgtattttctcattctacccttgcaactgaggaggagctagaacccttcaagccatatcaaaaccgtctcgctgctttggattatatagttgccctggaaagtgatgtctttgtttatacctatgatggaaacatggccaaggcagtgcagggtcataggaggtttgaagggtttcagaaaaccatcaatcctgacaggttagttcacaaatcagtacctgaatttttaatgtcatgctaaaagagaaaaggggggaaagttgttaagagaactctcatggtaaataatatctgtgagaatctagtctttatctaaatcaaatggtgtcatatgatctatgtagctgacatcacttaatgggaaatgttatgttgttgttaagagagaaaaatgacataatacaagattgaccgaaaagaacctacacaaataattgtaggacctactataattgttgagtctttctttctcataataggaccaaaactaaaacgatcctaatccttatttttttgtcttttgggataattgctagcattgtacatgttactgatgtttaatctgtttcattgcttttcagattgaattttgttaagctgattgatcaactggacgagggtgccatatcttgggaagcatttgcttctgaggttaagaatttgcattccaataggctaggtgcaccttatcttagacaagtaggagagtcaccaagaatggaggagaatttttatgccaatccctttcctggttgtgtgtgcaacaagtctcaggagcaaatcacaagttggaaactagaccatcggtttggtattggagctcgaagatagtgtagtgtctttggttttgttacatagtaggctaaacagtggagtttcatcatgcattatgatattgccttaaagttaaaggaagagctcattggggttgtgtggtgggaatgtgcttccttgttttctagcctggttgatgaggttgctgaagaatcaatcgggcccttgttgggttctcatttcattcaaaatatgagtttcagtttaggcgtgtgtgatcaaaaggcacaccatacataccacaagttagattctatactggtgggtaaaattgacaatactacccgtttgaatgtgagttaaactgttgaaaccatttgattcattgattctttttggaggaagattgccaaatggaacatgtttccaatttttggattgaacagttgttgttggttgatacatagaaatcttgtctatacgttcacaatagatgtcttgtttatatgtttatatttatgttgtacacgtctgccctgaattgcagactagtgtagaaatattgataatttagttaattttataaatatttttttatgttttcattaacttgtttgataagcaaaggaagaccaaaggccaatgcctcattttttcatgaaaaaatagatgaaattcttgctattacaaaatgaaacgcgtgtgccattatcgaagacagctaatgaaactttttcaagatatgctgctactttgaattgagagatttgagtatgtttgtaatctaaagaattcttgcgattcaaaatttatgctcaactttgtttactctgtttaagtgttaagctttctgtatagagtggaattagagatcaagttattcggagactaaattttagtaaatttattctttcgaataactcaaacaaatttcaatttttttctttgttaacatattaattcaattattaaattataaaagatctaattgaataaatggagcttataattttttgttgttaatattcaattgatttggtaaatattgattataagattgcctacttacaattgttcgatatatctaaaatttattgtgagtgattgttgagataatattacaaataaaagaatactttaattgataaaatattgttctattactaactttacaaaaatctcattattaattcaaaaactttcggtattaattagaaaaaaataacgtaaaaatatgaatacataattagaagagaaagaaagtattgatttactttaatatgatatgaaaattcaaaagacatcataatattcttttataaataaacatatatcataattttttttatcataatattgatatgaaatatctataatcgaaaagacatatataatttttttaatcataatattcatatgaaatatctatcatcgaaaataatgactaatttaggttcaattttggtaaacaatatttttgagaaaggcaagaaaatctaaatgtgactaaatcataaatgaataattaattttaaagttggtctaaaagattcaagttattttggaagcccgtcaagaagtaaaagtcatggtatgtttgagtgttagtttctctagaaatactttaaaaaaaaataagaagaaaaaaatgaaatgagtttttccataaactaaaagaagtcttctattggctaatttatagatgtcatctcatcttttagagaatttatattggtaaacttctaaaaattaattaattgagaacttatttttacttgtgtaaaaactcatctcatttttttcttcatattttcttcttctaaaagtgcttctagtagaaaaacaaaaggatagatatatgcttgtgggcggagaatataattaaatattttcttttatttcatatttttaaatgtttatctaaatttaaagatattctttcaagtcatcaatagaccattgatggcattccgagcattgactttgtgttaattaaatatatttattttaaggtgtgttgagttgagtttatatcaatattctcaaaatcggactgattattattaaatcaatgaaggcactagttcaaagattaatggtcaaacagattttaataaaatatttttttaatattttaatataatatcctaacaatatttactaaaaaataacataatgtgtataattgataataatacaaaaataaacttcacttaaaagtgtcatgagttataatttgttttttaaaagccaaaacgaggtttttttgaaagttttttttaaaaaaaaattaagtgaaaccggttaatccatctattttttttttatagatttttaacaagttcaacaattttgagctagtttaaggacgcatcggtttttaggaagtgttggatcgaatacatgaccattttccaatcaaattgactggtctaatccaagtttcaaaacaggtttatatttaaaaaatacaacaatagttatacttttaagggtgaatagtcatttttgtccttaaaagtatataacgttgacaaattcgtttatgaaagatgaaaaaaacatttagtcctcaaaagtgcaaaaagtgagacaaattcgtcttactgttaacttttgttcgttaatattagaaaactcgtctacgtgacacgcgtggatgaaaatgtcataaaattgatgctcacgtggacatagagactaaagttatcgacaaatatgtcattgatttaacaacttattgatactttcgtcatttaattatacaacttattaacaaatatatccacgaaatatataaacttaattagttgacatcagtaacaagatacatgtactaaccaacacattagacttagaattttctgattatattcttgcaaatatttattataatgcgttataattataattataattataatgtcaacttattaaagaagaatcaaaactcaagaggaggcaagataggagtaggtggtcactaatagagtaggaaaactataaaacattgtagttctagtcaatggcggatccagaaaaataatcaaggggggcactggtgacggggttcgggggcagcgcttccgaaattttttttgtaaagaaaatttaaagcaaattgcagaaagtaataaatgggatacaaaaagcaatagtctggcccatattaagcccaaataaaaaccctattattccagtcttttcctttatgttagctgcgtttctcttttggcttctcctttggttgtctgcgcttaaactttcttcttgatgttcctttgctgttggctgcctttcaatttctcttgaaaatttaccaatcttaaacgtggatccgccactggttctggtacctctcatatttgttttattctatttgtggatgatttattcaaaattttgacaaactaattttttattttaaaatttaattctgtcttatctcttctggaatcttgattcttcttttaataaattgacattataaatatactttaaaaaaacagttttttttttaatctttgaaagaattttttcaaaaacagagaacaatcaatgttgttccatacacttggaaaagtttgattccttgcacttcagataaaaatatagtctcacaaaagattgttaaattagtctcaccatgtggtttgtcttgtccatttaattagtggactaaattttaggccattcaaaaggtagcggcctaagcgggaatgatggcaatgtaaaccaaatttgaaattcccaaatcattttcaacctttcacttatcttaccattattcactaggctactctaaattaacctatgaaatattcctttgtcctatttttttgtttgccaatgaaactgccagtagttgaaagggtaaatgaaaaaggaaaatctaatcgcacgttttacctatacttggcagtttgacacccttctttttagatatattcttgaccttgaatcaatcccgatgaaaggaggaaaaaggatgacaagaaaaagtgcaagtgaagttagaaatgagagtcttgaattgatttgttctagtttgaaaattttgttttggtaggttttttggatagtttatttttagtgtgattgagatatactcccttttagattcaaatattagcaaaaaaaatcatattaactaagaaagttgactaacaacaattaattattacaccaatctcaattaaaaaaatgttattttttaaagtgttcttcattaaaatttgatatcaagaaaaaaatgagtaattaaaattaaaactcctattaaatgaaggatattttagagataaattcactaaataaagtaagattagttaaaattttgtttatatttaaattcaaaatgaaaatattttttttgcttatatttaaattaggaaggagtagttacttgtcagattgtgcaaaaaatagaaagaaaaaaaaagttgatacatattatctttttttttcctacagatacataattacatatctttaaaaaagtatttatgttcaattaatatgtggaccacatattaattaaacataattttcaaccttgatggtattttaagtgtatatatgtttggataagtatttataaacttgatttaaaataatattaaacttgattaaaagttaatttgaagttaaataatttatgattagaaacgtttgttatatttaaaagttatctaaaacttttccttttatttcattaatcaaacaaaattagttatttaaattcatttccaaaattttatttgtaaacctatagttttttaatatgttaaattagttttttagtcttcatatttattttttagattcaatttggtctttaaaaaaattggttcaatatggtcttctaattttttttatttggtctcggactaaattatagaaatcacactttgtcgtgattcaaaatcgtaactaagtgattttgaattgccacaaacacaaaaatgtacatttctcaaaaaatgaattgattttaaaaattaaaggatcaaatgaaaaaaaaaataaaagatcaaattgaatcgattttaaaatttaaataactaaattgaacaaaaaaaataaaaaaatcaaataaaacctaaataataaattagaagacaaaaaaactaatttaaccattttaatatcgatccttttaccatcaatcttttaaaatttaaacaaatcaaacaatgtacttgaatcatagtgaataaatcattatttaacctaaccaaagagtaatttctttcacttcttcgaaaaccaaaatttataaatcaaaattatatttaaatataactcatttatgattttatcaaacattttgtttttggataaaatttagtttctactctctaaactaaaattgtagatatgcaaactactataatctaaacatgaaggttgactaggtaattgtaagtaacttcaagctgaagttaaatagtaagtcaatcttcgggggataataccaaaaattgagtagttaacatggtccaagtccaaccaagaatcgttgagttatcacaaacgcataaactttttttgttttttaactaaaaacttggagtttacttgaaatagggagtcagtcaatatggaaggtaaagtaacaaagaaatataatattgttggagcaagattttctagaaacaaaatgacatgttagtcctaagatttcgagtaaatagtgggaagtactaatctcacaataattgatcacgttttattcatgaaatgttctttttcccgtttaattgttcggccttaagcaatatttttagccctcaagcactacgttttaatattaggaaagaaaaaggagttggtccaataaacgacgttggaaaaggtgagaacattttttttggttgcactaaataatatttttggtgtactggaaataacatattttagtgttaagtgaactttatgtttattgtctttttacaagactggtatttaaaaggtattttatgttctgactaattttaatttagctgaactaatttatttttaaaaataaagctcttacattatttttattttctaattataagaatcaaaagaataaatgaaaccattttttaacaattaatataaattggtgtctttttctttactgttgagtacttgacaaagaaaagtaaaataaaatgatgagattttgaattttttattcattattaatgagttaaagtatactaatattttatatagtttgaaaatattataattgaaatttatttatttattatattatattaatttctcttatgtcgtataatagaataatttaaaaaaaaatactttgttgggtcaaagagggagatataagatgtcagagattgtgcttggttaatattggtcttaaaatccaaaattcagttattgttgggctcattggtatgaataagtaaaggaaattgctattctcatccagatcaggaggatgtgatgtgagtgtatgtgtcttgaagcaaggtactagctgggatagatgcctgcctatggtggagtccctttatagtgatggttttcatgttagttgggacatggcaccttatgaggccttgggtggccaacggtgtaggaccccagtttattgggcagatgtaagggagagacaactttttggacctgagttggttcgagagacttttgagcagatccgggggatcgaagataagtttatgagagctcagagtcgatagaaaggatattttatcctagacacagacccctgcagtggatgggggtgattatgtgctcctaaggttgtctccggttacaggtgtaggacgggctttgggggtgaggaggctgagtcttaaagtccattgatcactatcagacagtgtagggccagtggtctaaggactagctttaccttcctagtcatcaagactacatgagggttttccatgtactccagttaaaaaggatgtgaccgattcgtcacatgtggtaaaagcccgacattggtcagattagagaaaatctgacaagtcctacacgacctatgaggaaaagcaggtcttgagcaggaccattccatagttgggttggaattttgcggacaaaattcctaaaaaggagggggtgaatataataacccaaaggtctagcgcggggtgtcgcgcggatagcgctagttgggctgatgagaaaaatcaggtttgaggtgtggcacgatcagcgccaaacccactggaatctgacgccaagggcgccaggttggcacggagggtgccaaagtctctagaggttgacgccaggggcgccattgtggcacgaagggtgccagtgtttttgcagtcaacgcgatcagcgacaggtgtggcgcggatggcgctacaaggtcaatggaggatggcgctgatggcaccagtgtggcgcgggtggcgccacagattctggaagttggcgctggaggcgcgggtgtggcacgattggcgccacaaggtcggtggacttggcgcggttagcgccagaggtggcgcgatcagcgcgggacctctggcagacccagtatataaagcctggtcgcgattttggaagggaaatccgttttcttcttcctctgagcacctttctgccattggagagcttcccatgctccaagaaccctgttttgtgacccatatccctccctataacaccaaacctcctagaatctagttgagagccgtaatccttcatctttttcttaagaaaccccatgagctgagaagtccctttctcaaagggaagttagaagaactcgagataggtgaggaacagtggcgattcatggatacctgagcccagagaagaggtccagaggccttcctcaccgtttctaaggtaagaaactcgagtttctccgtttgattttagagttggaatttggggtgaatagtgacccactgttgatagagctagaattagctctgggtcctttagagaaacatgtttagaatgatgagaggatgaaggattagctcgtagtttgtgatttggtgaactttgatcttggctctaggatttatgcatatgtgacttgggttgagtcacttgatgatattgagacatgcaagagccttgttaatgggcttgatgtgcctgagaggccacatgaacggtgtctggtgtatgatatagaccgttcaagccctatggaaatccctgagttatttgggctgggagagctttgagctcattgtgtatggcttgtattgagtctatgatgactttgatgccatgtttgagctgagatagaccactgagggtctatggaagggttttgtggatgatgagctttaatgaactataggttagatgacttaaagcctatggaaagaactgtggttcctttctttgtggcagtgaaggactacttgatgagcttgtgtatgtttatatgattgaatggtctgtgatatgtgttggtatgccttgtcagggcttgacaccacgagtgtcagtgacgcaaaccaccgctcaaggagtggaattaaagagcaccgtttaacaggtaagctcatcgttcttgggataattcccttgcctttgtttcaccacccaagtgggtgattggttagtatgccctgcatcttgttattgtatgtggttatgattactgagacatgtatatgttgttgagagaaatgccattgtggcttattgttgatgattatgagagttaaacaccgtgatggtgttaggatgtgattatataagaatgcatggattatagacactgagatagtgatatgagaatagatctatgctaggcactaagatagcgctacggggatgatacacctgttggcacaggtgtgattggttttggactcatttgattagtgttctatgtctgttgatgagataaagaccagggtagtggtctgcatttgaggataagtggatactggaatagtatcgtgataagtaagattctctgaccattagaataggtttatggactcccttggaatgagtgcccgtgtggatgatcttccctgggaagtgtcatgaagtcctgagggatgagtgccctatatggatgatctctctcaggcagtggaaaggtgaaacctgagggatgagtgccctgtatggatgatctttctcaggtagtggactgtaagtcctgatgaatgagtgccctgtatggatgatcttcctcaggcaatgaaattggtagttctgaggaatgagtgcctgatcgaggtcgtactcggccaaattaatacagtttaaatgtagtactaggaagtgactcctaggtcgtctctcaaggatcaattgtctacgttagggattaaaaacgtgtactgggggggggggggtttaacaaaatgcaagaatatctaaattaaaacagaaataacaactaattacagtgattaaacaagtcagacctttgaacagattgcgcctctaatatccttggttcacgaaagataatctatcctaacttaatccttggtaatccagattaatctactaagcgaaaattaacctaaaatttccctacacgaattaagcaaacgcgaacctcatcaggactaatctctcaggattaagcaacctgagattactgaatcaccaaatcagaatcattaagcatgactctaattcgaaaagatgcagaacagaaacccaacaaggtagaaccaagcagaataggattagaagaacagagaacctccattaaaggtctgcaatctgtcctagggtccaaccctaggatttagccttccatgaattcgaaaattgcaacaggaatacggattgaatggcaactgaacattaaacgaaactagcagagaacgaaattcaaaagcagaaaacgaaaatcaacataaaacagaaatgaaaataaacagaaacgagaatcaaaaacagaaaacaaaaatgagatgaaatacttgaagcagaaacgaaaacactgaaatttaaacgcaaccttattccgaaagcagaaatccaaacagaaaacgaaaaaccctaaaagaaagctcagcagaaacgaaaacgaaaaaccctaaaagaaactgaacgtgaattcccttctgttttgcatgggcacagtattctataaatactagtgtttgacctaaacgaaaatgggcctttcctaacaattttggcccaaaaaaaacgaaaataaaataaaatgaaaataaaatgcttatgtggaaaatgatgctgacgtggcactccaatcttcaagtccatgaattaattccaagcccaattaattattaaactgccctgaaaatataaattggaataattaaactaaaaaaaatccaatttagttaaaatctgaattatcggtccaattaaatcctaattgagaaacagtgctgaatataaacaattaaacacaaatcagggattaaaatgagtacagaaaggtgagaaaataaaggtaaatagtgactcatcagtgccctgtatggatgatcttcctcagactgtggaattggaagtcctgagggatgagtgccctgtgtggatgatctctctcaggcattggatgtaacgccccattcaatcatcagggtcattaccaaacattaatcaacaatcacacatataatcatcagagtttaagcagtttggaagcataactaagagtgacatcatcaaatgtcatcaatgtaaccactgtacactataatatggtgaatatacacaaaatctctgtttaggtacaaaactgtacatatatctcccctcagggtacaacaaaaccaaaccaaaggcaaaatacaaaacatcagagccacatgctcatgtcatctatgcctaaggtttacaagtaacaactatccctacataggcttcttgccttgggatctatctgctcatcctgaggaatcacctgcaaaacataaagccccacacaaggggtaagatataaaatcccagtaaactcagggcccttgaagatatttccttcccttggtccactttcaagcatatacatagaaatagtatatttcaaccattcataatcagattcaatatcagaacatttttcaatcattcatcatgcaaggtagggatctcattccccttcattaaacatcatttctaccatttcacctcaacctgtcaatactcagatgatatacattacttactcggcagaggctacatctatgtatataggaacatctccacttaggaggctacctctatatactaggaacatctcatgcctgagtctcaacatatctaacggaggcttcctctgtatatataggaacatctcaatcaagaggctacatctatataacaggcacatctccatctaatgaggctacatctgtgtatataggaacatctctactcaagagggtacatctatatatcacaggcacatctcataatctatatcaacacaattacctgaggaggctacctctgtatatatataggaacatctccattcgggaggctacatctatatcacaggaacatctcacagcaggtcttactcagtctcatgtcctctatcatactaccataggattcaattcattcacagaattcacattcaactctatgagtcagccatgcatatcataggctatacagtccatagtcatacacatcaatcacccatcacagggttcagatatcatttccatcatatcatatcatcatacatcaattccccctcacagggtacaaagtacacatcagaaatcaatcacatcaacatacaatttccatatacatgcctttgctcatatcagaaccatcctccatctcgagcatggtggaacacagtaaggacatacatacaagaaccaagagcttacctactctaggcaaaacaccggctctcccggcctcgtggtcaccaccactagaactatcaagctcacgtcctatataagaacaaacatataacttatcaaatacggttccaagccgttagaacgaaaggaaactataatcctttctgcataacacacactcaatcacttcacaagtgattctcagaccctcaaaaggatcctactcagcctaaccaaggctacagagcctctcccaagattctgctcaggctaacataagatacatccttgctttagccttctcaatttcaagcttcccaatacaaccaattcaattcataaacaacatctataccatctcttgagcaactttatcaactgctctaaggttcacaataaccaaataactagtcttttctctactcatacataaactcagagccaaaatcaaacttcatcaataatgatgactcaaggctctaacttcctcagaacaaccctctgaacacatttctctacagggtccaagcctaataacagctctaacacctccaaaaacacctctcaaggtacccccaaaaccaaaggctagagctcgagtttcttacctctagagggtcaaggaagaccagggaatcactttccccaagtataataaccatggctaaacaaaaaaaaatttactgtagcagttactgtagcttggcgctgatagcgtggcactgtagcagaaagccatttttcacgttttttggcgccatcagcgccagagtggcgtgaggagcgccacagatgctggattttggtgccaagagcgccaggatggcgccagatacattggattttggcgccatcagcgccagagtggcaccaggaacgccacagatgctgaaaactggcgccagaagcgccaaagtggggccaagggcgccagatgcactgaaaattggcgctaagagtgccaaagtggcgccaagggcgcggcatgtcagtcaagccacctataataggccaaatcacgatttttccaaaggaaaccactgttcctcttccttcttgaccctaggcagccattagagcaccttagaagcttcatatctccattataaaccattaaaacacctcctaatcacctttaatcttgaattgaaccatttaggagccaatttcagcctagtttggagagaacccccattccttgagcttcttgagagagagctgagctttggagaggaaaagaagctggtacaaggacgccagagttaggagaaagacttctccagccttccttgactgaattaaggtaagaaactcacatcctaaccgtttaattcttggaatggcagattgggtgaatagtaatcaagtattgatagggctggaattaggcttaggttctttagagagatgtagtcaggaggttgttctgagccatatggtatgttgaaactgaaattgtgatgaagtttgagtttggctctgggaagggagaagagtgggtgaatgagcaatgttatggcctgaattaacttaagtacctatacaaaagttattcataaggccaaataatcggtgaaaatgtgattatatatgtgttttggctgagttgaaccagtgtgggttcttgattctggtacagcttttagttaagctgtacagagttctaaaggaactctgaggccttgtgtaactgaggcggaccctgagggtcaatgtatgtcctagtagaagctgggctaagataaaccttaagttagaagattttgaattggttatgtgtggaagggtgtttccttccatataaacggttgaatgccgtttctgattatttgattcatgcatattgtagggcgtgaagtacagatcgctggtagagatcaccacgagactaggggagctgattctgagctacgaccaggtaagctcaatgttcttggggaattgtttccccctgcttgtgtttactacacccactttgggtgtttgtttgatatatattgtatgccaatgcttatgatgatatgatactgaatgatgtgcctgatgttgataaaatggtctgatgatttctgacaattggatgctagattgaccctgagatagggtatatgcctatattgatacattgagatagtatagaatatattgattgtgataatgatgcatggcttgattgtgtgaggaattactgaccagtatgatgtagaactatggacccttgggaatgtacccactcagtggatgatcttccatgggaaaaatccataggcgtccatgtaaaccctgagtagatgtacctcgatatagatgatcctattcaggtattgggcggaaagtcctgagggaatgtacccttaagcggatgatcttcctcaggcatagatagagagagagagtcctgagtagatgtacctctgaggagatgatcctattcaggtactcagtaaggagtctgagagaatgtaccctcttatggatgatctctctcaggccctgtgtgttgtttgcagatgtttgtattgagataccatgtgaatacatatgtttcttgtatgatgtaaggctgattgtattatgagaattcaaatcatatgattttgttatgctgtgaagtgaaccaggggggaaaggaaaacccctgagaaccctgagtttactaggatgattatctcacccctgtttggggattatgttgcaggagtagaggctacggtcactgagagatcccaaggcaagaggcctgctctgggacagtgtgaaggtcgcctaggtttagatgattgagcttgtcgacttagattttgtttaatttggttgtattttgatgcctaggggacatttgtatagttttgagagttatgtaccttgtaaaggatagataattcaccatatatgtataaaaatgtagtttatcattagttcgggcttccttaaatgtttatttccatgcttgctgcgatactctgatattgtataatgttaatacgtcgggtgcacacggggtgttacaccaagctagatcgcccatgcaaggcttccttcgcccttgggtttcaagctctcaagggttccctcagagaaattcaatctcgccgtttaccgccttttgtcgagaataaagctgggtctctagcttatctcaaggctctgaacactttctcagttgggtcggaggtgtttagatgagaaatggagaagatatggaggttctctggttaacaatggctgctctctctctctctccctctcttttctttctcattttcgtccagcacaagctattataaggctgacccgaaagtcccgcgcggatcgcgctatgtcccgcgcggatcgcgccacaaattcgaaattactgccctgacttgtgcctctcactcggttagcgtcatatccacgcggattgcgccatcctttcgaacctcctacgcggttagcgccggaaccacgctgatcgcgcgagatggccgaaagcattgccctaattcaagcctcccgcgcggatcgcgccagaccctacgtgggtcgcgccacatgttcgaatctgtttctcacttctcttaagcttcctttttagggactctaatgcatggttatgttttcctaatcactaggcttaatcccatgcttaaaattcaaggtattacataggacggaaagccctgagggatgagtgccccttagtggatgatctctctcaggcagaggattgaaagtcctgaaggataaagtgccccctttgtggatgatctccttcaggcatgggattggaagccctgaggaatgggtgtccctgtgtggatgatcttcctcaggcagtgtgttagaaacctgagtggatgatcttcctcaggtagaaagagtgtggaagccctgagaattgagtgcccttgacggatgatctttcccaggccagactgtatacaaatatgttgtatctctaaaagaagatattccgaggggatgatagtctcttagaagagccatatttggatgagtgaagtcttgagtggttttctcaggcaatgttttatatagtttcatgaggcggtgcctctctgatgttggaatgtctattggattgacacttgtgttatgttatccctgtaattgggttacgagaactaggatgatgtcctagggctatgattatggtttgatgtcttgtgtgtttggaggtgaaccaggggaagggaggatctcccagaaccctgagtttactgagatgtttatctcaccccgtgtgggactgttgtttttcaggtgactcttctagctgagaggagcggccacagggcaggaggccccagtagtgtgtgctgacatggttatgggctgcagtagaagagcagaagagttcttttggttgagacctgattatgttccctgtgtagggatatggtgtgtgtgtgtgcacacatgttattctgtacatattcttttgtataaccacaggtgtggttttgactcggatgtaaatatgtacagaactgatgttgttatgtatatgttgatgattcctcctgattatatttgttgagatttcttgtatatctgcctatgactttgtatatttgtgttatactggatcagcaggggcttgatattataatgttgtgtgatgtgttttatgtatttcatacataatgtaatcaagaaatacggtacgattcgctttcgcaatgatttaaataaagttttaagcactaatccgatattataaatgtcaatacgccggaagcctactgggtgtgacattgttgctctgtattatctatttgaccattactccaagacaagatgagcaacagaaatcatgtggactagaaaaggcccaacaaaataataagaacatggcagtttttaatcttccaaaatagttaattgaatgtaattttacattccaaattaggtataagaagtaattatgagagtgaaggaagcaagtgtctaacaaatatttagaaaactcacataccaaaaatataacacaagaacgtgcttatttgtttggctaaacaaatatttagaaaactcatgtaccaatgccaagaaaaaagtgcatgcagataaattgaagagttagatcttagcagaaccgtgatcagtttatcataccaccacattccgtggtagtggattacccactaggattggactcgtggtactttgcatggaatcttaagttctatttctattgccttcattgtaaggggaaaaaataccaccagatttaattcctccagttccgtttgtgtttagttccagcccaggtttgcatgtttgcattgtcacagaacaattaccaaagcaccgccaagtgccaagcacataaatggacaaattctctagtaccatttaggagctacttatatcattttaggaatcaatttctcacaccttacaagtcatcatgtaaaatctatgactacagttatttaaacatcctaattttgttcaaaatcgatttcattcaacttcaaaataaacaggtagttaattgtggatttttgcatgtatagaatgaaggtacataaaactaaagcagaaggtgaacaaagaggaaggaatatattacaaatacaaactgcaacccattacaagaatagtgtacatttgaattttacctacaaaattttcaattgacatccgcctcctgttcatacatgcatgagtggagccaaacgaaacaaccaaacaatttttgcaatctgattgcgttcatctgcccccattttatatcaaacacatgcagagaagatccaaataaataatcaaacaataactaccaactaatgcctcaaggctctgctaagctctattaaagttacagatacaattttaatcaccacaatgaaggcacataaacttgttctttgagattctgagtagcactttcagtagggaaacctctaactgcaccaatagtccattgggatataattcctgctgcaacagcaaagcgtagctgtctctccaaaacatcttgattttcaaacatttcagggcaagtggttagttttcttaaaatagcagccacaacagcatcacctgagcctgttctatcacaagtatatggtgttatgagcacatcttccgttcccatcacagacccatcgaaagaaggggtatagtagtgaattctaattgttccatcagtcacaaagaggaatttcagtcgatcatgccacaaaggcgagacttcttcagcagtgtaatggtaatactcttgttgatttttggtttgttcataactttcagcaaagtattgtggcctataatttctcttcctctcataatattcttcatctagaaggaattctagttcacttcgtgaaacttcaatgatgtctgcttcattccatgcttttttaattatttctcttgtttcatcacgtgatctccacagaggtaatggcagatttaaatcaaaaaatacaaggccgccaaacttcttagtccacttaattgctctgaatagggttgattccatcgaggggcatgttagaacttctgaattgaaatggaaaatcctagcctgcactagtccacacaaaagcaatcacaacaaattcagtttacatttaacaccagcaaacatgtcgatgaagaagagtcttcctcctacattaacaaattgttatcatcaccccatctatgtcgttatatggctatactacccaacctaacatattaaacttccctgcccaaacaggtcttacaagttacaacattagaaagtgtgtttggttagcagggaaacaaaaacaatgtaatggaaaaagaatcaaaattgacaatatgtattcaatagtgatgcatgctgtaatattttgttgacctttgttctttctccatcaactatttcttttaagttttaatctttctccatctgaaattcatccttctcacactaagcacatattaaattcccatccatccttattgcaccttgactggtaaagcaatcatccacaacgaattccactgtagcatcaaaattaattgttatgctcatcaccttttcatccacagcacagcagattcaataagatcactcacaataaagtgtgataaacatccggtgcctccacatacagttcgatgaaaaatgttcactgcattaacaagtcctatgcagcttcaatatgaaaatcccagaaccaaacaatcaagaaatctgtttagtttatgccaaagttcatatctgactaatcccctgctggaaatttttatggtcagaattattaaaatcactgtccaataaatacactattaaccaaaatcaagttcatacaaaataaattttgcttttgcaataataatgctactattgagtagaacacttgcatacccgttacctcaaatcaaaataatgaaacaaattgtaacaacccagctgtttaaacaatttctttcttcacttttctgtttaaacaattgcttacttcatttttcaatagactattctaagatgtggctaaaatatttttttcctctcaaaatatgctagttcgaactcgtgttataatgatcattagtcaatagtcattaccttatcattacctcctatcgaactaattaattgtaacatctcagacgaatcacaccagaatcagagggattgagaggtctcttaaacaagtggtctaagattcgaatcctggttaaccattggatatggaataaatcgtgttgcgaaaggaatactcgggggaatgactccgtgccaatatcatggttataaaaaaaaaaaaaaaaaaaaaaaaaaaaaaaaaaaaaaaatcactaaccaggcctaaacacaaaacaataactacctctttcaaaacggcaaggttgagttcacttgcaagaaaggagtcctccgcggcctccctaaccgtctccatcttcatcctcccttcttcctcaaagttcaccttcatgtacgagcaccccgtcctgtacttcgaatcaatcttcacccctctcgtctgaaccctctcttcgttcatcatcagcaccatctcctccccgaactcgtcgtccccgaccttccccaggaacgccgcccgccccccgaggcgcgtgtgcgccacggccacgttggacggcgggccgcccggcgcacgtgcgaactcggggggcttccactgcagcatcttccactcggagtagatgtccgggtgcatcgggtagtcctgcacccgcaccgcagggacgaactccttccgcgccgagccgaagcagcatattaagggagggtccgagtaggggaagtccacgccgtcgtcgtagtcgtggagttcatcttcttcttttttgtggtctgcgttttgggggggaagggtgtcgtttgaggggggtgtttgtgtttcgggttttttctttcggccgcggcgttttggggttggggattcgacggtggaggctctgagtaaggttttgcgttggaaggagggaggtttgtgtggggttgaagagtgggggaagggaagaagaaggagatggtgaagtgacgccatttttgggtgggatgggtcagtggaagaagggtttatcgtccatgttgggtttttgcttcgctgaaggacgttatcgggttataccaacccgggagttcaaaaacaaattgaacattatccgatcgggtcgggatttttttttaaaatcattttattattggtatggaatctccactgtttttattggttagtaattttcataaaaaacttgattaatcatctttttaaatattttctcctttctgttctggagtcacaattgggcctatgttaaggcccaattagttacgatatgttaattaagattcaacgaatgtggactgagactcagtccactcaggtagttactaacgtgcaggtggaagccggaaatataggaaaccactggtgcacgatgcagttagccaacggtcaggtactatgcctataaatacataatgctcgttggtgaaaggtacacattcactctagctctttctttcaattacactgagcacacaccccactcccaatttcgtgtatctcagtgatctcctgcttcaaggtatcatcccctattgatatccttggatttacagagttagagtgatcaaacagcaatcatatagcactttcgtgctacacatttgtgttctacaaatcatacagaacactttcaattatactttttcctccataatgttagaaattgcttttgtcaactgttacttactacaaaattgatttttaaaattcaaaatgtcactcaaatatgcaagttaccacttaccagttactactattattaacttattaagtttacgtgcaactgactttaccgagaaagatagactgcgggcttcttcatttgttgctgcgtaggccgctgatccaacgggtattttcagtttctcatgctgacgtgttatctactgcagttctgcatcgttagatgactcttcggagtgtcctaggttcgtcttctagagatttctttcttaagagcgggttttcagactcgagacctcgcaggtcgttgttttttccttctctggtgagaaactcatccagatttttcttcttctgttttttttttcctgaaaaagttaatctgttatggcttcttagtttgatgattaacttcttggttggattgcgattgtttcaatttagtggctcacataaaattggtttaactgatagtatttattatggtccactgttatttttctacttactgagattacaattttatatgttttcggtttgcatgcgagtttgggttgtgccatcggttaactgagtgttggtaaccttgcaatcttgcatgatttcgtcgatttacttctgagaaagagaaatgtcttaaaccactgtttagttattattgctagaggggcaaaactagtgtggaaagttggaagtaaaatttattgattattgatcctttcactttgattattagtgaagaatcttatgtgcagattgattggtttgagactttgagttgtgctgttttacttgttattatactctaaaaattgaaagccttgtgatttgtacacacaaagttgatggttagatttgaggatcaggaatgttactgagaacctgtgctatgtatatgtaacttcctaaaggaattgaagataaccagaacttactaatactgaggttccttggtcccacccttctcattttgccatatattatttttaatcagcatgtcatgctgcacttttgcagtgattttatgaattggaatagaaatttgtaccattgcggactagaatcatcagctttacatttttatttggactgtgtttttgcagtaattttaactctggaggaaacaaaattcactaagattttttttccatatggggattggtgttctgttgtctgggatccttattgttctccatgatttggttaagttgcttggatttgttcatatgaaaattggttgttctattattattatttttttgtgaattttggtatggatactattaaaaccactgtaattattgctccaaacaaaatttggaagctgcgagacacccaaccgacccaagaaaaacagcttgcattttatttagactttttctgagttctttgtaacatgaacatacgctagctggtaacttgctatagtctttgaaggttggttttaggataggaatattaattctatgtagaatgttaaattagttttggtttgcatccccatttagcccgtctagtcaggataggcaaaatgtatgaaatttattgcaatcatcatgatatttgagggtacatagaagattgtagagggcaggaacatcttgataaaatctcttcgtttttcctccagaattttacatacaattgtcaattctgtgtagaatgtcaccctagtttgggtttgcatgccttgcactctgatttacttggataactttggttttggctttattgatcaatatcccatggagtcaaaacgttggccctgtatgcagttcaaaccaggtagaaagatagcctctatttataatagtgaccttagaatttgcttgtgcatttcataccctattgatatttgaatttctataactgattcctgtgtgaaaagttaagtgaaacttatgaagaagctttcctctgaatactaagatgcacaacccaaagaaagtgaatgtgtttcggtttaaacaatttgctttcttcatttttccacaaaatcttctaaggtgtgactaaccctttgtgtttgtggcagaagatggggttctggacattgctagaaggttttctgctctttgcaaatgcattggcaattttgaatgaggaccggttccttgctcgaagaggatggacattggcagaaatgacaggaccacagaggaattctcttaaagggcaagtaatagggcttatatatgcctgtcaattcctgagacttccccttattctcttcaatgttatcaccataattgtgaagttgttctctggataacttaaaaagagtggtatatcatgctctattctttgttctgtgtatgatatgtaaattttatgttccgtgaacagttgcagtcctataaactcaattcagaggtataatgaacagagtacaccaggtgtattagtttagtattgaatgtgtcttgattatcattcttaattccctttgaatttgcaattccgtatggtctattaacttatggtacataaataaccatgctagcataggtcgtttaaatgcactaaccatcagcgtcatacttgtggttgtggccattgaaattaaataacattcttgaagttttggtttttaaccgaactaaatagcatcgtgtgatctatgtaatccatctcacttagtgggataactggataaggctttgttgttgtactcatgtccattgaaatacaattatgatactctcatactatttttttaaagcactgatgcatagttgaaagggtaggtatgaaaatcatttcaccagaattcaccctctcaaacagctgtttatcattggagaaagcttttgcttcgaccaaaaacgcatggtaaagcacaatcatggcaccaaagtcataaacaaccagaaaacaaaacatgacacataaaaaacattcattaagtgtatttaattaaaaaaaaataacaagaagcagcactacaacaacttcttaacatcaacatcatacaaaagtaccagaaacctaataacaaacagaaagcactaaaatatgtaaatcattattcattaactaacaacacccttcaagttcattcaaccgggatcataacctcgttggtcctgaacgcaggaattgtccaaggaggattgtacctccccaacaagaaatccccaacaaccttaaacccatctttctctaaactctccctcagcttcaccaccttctccctcaccagttgctccgatgccactcctccaaacttcaccaccccatacttcctctcaccctcttctctgatcacaaccctctcatcggtcggcttaggcgcctcttcggctttcctatacacagccggcaaaacaaactgcatagtcaccatcttgttcttcttattcccttcttcgccttcaccgccaccctccttcgtcacaaccggggccgtcatagcaatcttcccaccattgccaccaatattgtcctttgtgataaccggtgcagtcatggcaatcttttcaggcttggtgttctggggcttccccacagcaccaatgtaattggccaaaatcataaagccaccatctttgttccccttgaactgtgatgggtcatatgtgacttcagccactactgagggtgcatacttgcggatttcgtactcgcttgaggatttgatcacttcatattttgctgtctcaacgctgatttttccaaacactaaacccatcaaggacaaagaacggaaatgggtgtgctgagaatttggagatagcaatgagtgatttggataatgatgtggtatggaccgtatatatagggacttgcatgttatggaggcgtttgtaaacttgaatattcctggaagcgacatgtctctgtttctttgagaaggggttagcatctttggaattttgctccgcaaaattaatggctgtgattctgccacgatgatgtgcaattgtggacaccgttttttccgcaagctcgttgatttggttttgccgttcttttctttgttaggaatttatgtatatatgtgaaatgcacttttttttattgatgtagattataataattatttaaattatattttatattttttacagttatttttaaaatattttctgtaatcaaataccatttgtggaaataaaagaaatgttttagttgaattgattatcttaatgggataaaatatatattatattttttagttcaaaaattatattttcttaattgaattgtttttatgatataaggctacttttttgttttgtaaatattaggttttgttgtatattttatcatctaacttttattattttaaaaaattattattcaaatttatttttgtgagttttatcattcaagtttataatttttgcacaatttatctatattaatgtttcactaaaaaaacttacatttttttttgcaaaacaatgttgttttgttatcataaaaaatgaaaacttaagatgataaaatttgccaagaacaaatttaggtggtaaaatattaagtcaacaatttaacttgattatatagattattattttatatcatataggaagtaaaaaaaacaaaaggctcctttgaatttatagtgaaaatacatctgtttgttttatacatgactacagactagcactctttaacaaattcatctcatttgaacaatcttatcaccaaccaaattcatttatttatttagaattttattacaattaaatttctttaaattatacacataatttttttcttatgaacttttcacttatctcaattttaaaaaacattgtcaaactttctgtgaatgtatactaatcaattaataaaggcataaattcaaatattcattaatgatactattaaaacatattatctctgccaatagataattgtaaatgtctaaattaatattatttattaaataaatataaatataaataaaataattaatttagtaaatacatgaagttaaatacctaattaacccatcaataaaaataccttttattttgggtgacaacttatcaatactaccccatattcacacattataaataaaaacatttctttcacaactcatgtatgagtgtgagatgagtaaaatgaaagaaagcttaaaacaaaacaaaaataaaatgagaaataaattaagtggtgataataaaagaaaaataaataagagacggtgaatattaagaaaatgtaaagtaaggtaagacgattattattgttaaagttgtgtgttgaactttaatataattgcatgttcttaggacataaacttggcatatgggaaggatattaatgtggtgtaaaaagggattttgtcttactaagtatgtatgatgaatgtggcaaatcttgtgcttattgtaattatttgtttccattttattaataatttatatttaaaattatttaaattaaaatataattttataatcaattcataatccaatatatatactaaaaactatttttatcagcatgttttaagaattataaaaaaattgatgagtaacttatgttaacctcaaacccacaagtagattgctttacaaataaaaaataaataaataaatttgacataaaaaaaacatggtataatataatactactaagaagagataacaaaggagagaaaatacagaattgaacttttgatattattagtatagaaaagttagttaaagtcagatacaagagaggtttatataatctcctaacagaattcactaataagctaatgtacataggtggtagatagcaactgttacacatttacaaatagagatgtgttgttagtaaaagctaacaagtacttacaggttttacatttgttaaatacaactctaatatccccccccccccctcttcccccctcaaactcaaggggaagagttttcagaagaaacactctttacattgagtttgcttcaaagaaactcaaatcttgctgatgataggggtttggtcagcacatcagcccattggatctagagctggaatgtgcataattgacagctctttagccagaactttctccctaacaaagaaaacatcaatttccatatgcattgtgctactatgaaaaactgggttatgagctatgtcataccctaattttgtccaggtacccctaaaaaaaagtattattattttaaaaagtgtaaaaaaaagcaaaaaaggaaatagaaaaaataataacaagtattaaaaaaaagaaagataacaaaatacataaataaataaaaaataaaaaagtataacaaaatgaaagaaaaagaaaaagattacgaataaaaaataaatatatataacaataaaataataataataataataaaaagaaaaaaaaaaagagaagaagataacaaaaaggaaaaaagcgtagcaaagagcaaaaagaaagaggaaaaaagggcccaaggcccattaggtcaaggaaaaatcacaaaaaagaaaaagctacggttcattataaaggaaaggtgaggcgttaatggctgtggggtgggggcacgaatcccaaggagaggaaagaagccaatagcgtcgtgccatttggcattgaaggcagagaaaggataggggtctctgaggtatccttcattctccctttctcttctctttctcccctctcttccctttcttctcttctcctatttttttatttttttttctctggccaccaccacaaccaccgccactacaccgccaccaccaccgtgtgacaccacccccaactgccacacacccccacgaaccaccacaccatacgagcaccaccatcactaccatgcttgttttattttcttttttgtttcgttttaaggcagcttcagccaccaccgtggcaaccaccgcaccgtctcgccgcctccgtgctcaaaccacaccatggtggccaccacaccaccagccccttatggtggtgactcaagaagtcacaaaacctcaatgaaaagccccaaaccctactttttcgtgcagatgctgcagttgctctgcccatcaccaaaatacaggttgagccgggtcgccctgacccggttccaactgtaaaaaaaaataaggactttgctttttgctccccagcttctcacaaatacgtccccctaaaactaactaaataatgctttctacacacccagtttcataaacacacccctttaaacccaatcaaataatgctttctgtgacacacattttcatgaatacaacccctcattttgggctttaaaaataatgctgttgggcctagcccacttagctgttaaggcttggcccactttcaagaagacatatatttactgtttgcaccatgcttttcataacagcacccatttccctattgagccttgctcattttgaacaaaccatatattgttgttggcacctactttttgataactgcacactctcagcagttgggcctagcctactttgggacaatgcatgtaatgctattcacaccccatattcataaagacacctctaatctgttgggcctggcccattttgtaattaaataatttttgctgattgcaccactgtccttactatatgcactcttgttggttgggcctagtccattttgtaattaaataacttcttctgattacaccccctatccttactgtatgcatccctaattactaagtgtaccctcacttctattctatcccttttctatttctattttatttatttgattacgtaatgttatgtatttatttagtacacgcttatgcttcgtgcactccatgctggatctccgactcacttagtagtgtttcaataactcgtggatagatttgtgaatatcatgctaggtctctgacttgcttgatttcatagagtttaccacaaattcaaaatcttttctataaaaaaaaatacccaaatgaaggattactcaattctccttttttctcaaaattatacattactcgagattgcttcaaggtccaatgccttaagcgattctctccgcttttccttcaaaatcaacgtcgtttcaaggtccaacgccttaacgactctttttcatgtgattgaaacaaatcttttgggaaaataaaatcaatccaatcaagtttttttacaaagaactacgtaagtctgatttcctcattgcacttggggatacgtaggagcgagggcaaatcccttgtcgacctaaaaaactaaaaaaatatatgaaaccttcttttctaaaaaataaaagtttgatttctttttctgaataaacaaaaataaaacaagcataggcatgttcttaagggatgataaataattttaaaagtcaatttatttgtcacacgctcgattaaaagctgtcgtcttcgtgacggacgcgtggggttctaacaccttccccgtgcgtaaatgactctcgaatcctttttctctaaaatcgtagaccatgccttgtcttttggtttttctgacgttttccttaaataaacgttggtggtgactcccctctagtttcccttttttttggggaactttcaaatcttctctttttcgtcgtcgtccccgtcgtggccggataggttgcgacggatggcgactccactggggactggttagagagttaagcaatttaatcgtgtgtgcaattttatcgtgactttttcgttatttatttttcctttttcttcttttcgttgtgctcctgtttgttatcgtttcactctgttaccgttcttttcattgttttgcttctatctcgttttttattctttgtctcgctcatgcttgtatatatatcctttgctatgttgttacgcctttgtagttagaaataaactgtgtcattgaattctagggtagacgacatgtgttatacttgttgtatctgcttgggaattttctgattgttttgcaggtggggttgggtaattcttaggttgctttgttcacacacgacacatacactttttgcacacactttgagatattgggtcctatacccgagtttgtgtgagccatagggagtggaggtcgatctgtggtcatgctgggtctctgactcgcttgatgacagtgaagtctcatctagagttttcctctttttgtggtgcattgctactggtagtccctatcgccgcattatcattacataagaggatgatatctctagaagctggtgaggttacatgaagccacccttggaagttgtcactgaatagtggacttttagacctttccgctaggttccttgtaacaccccaaaatttagggaattacagacaattactaagagtaaaatgttaatgaaagcagtagaaaaatttagggcaaaatgacataaatacccccgaacatttgtaaaaatgacgtttatgcccctagggttaaaatgacaattttgtcctaaacaattcaggaaatgaccaatgtatcctagatattttagtaagatatttctatgagaaattacataaatgtccctgaacaaattggataattaccattacgtcccgaaggtggtaaatgactaaaatgcccataggtcaaaaatgacccagataacttcagaaatttatgggaacctgagcatagtataaaacacttttagataacaaattattagcaaggttgaaggcagaaaaccctaagatagaatttctacaaattttggaagccaggtttaaaagagcttaatctagactaccctaggtatcagaaaattataagaaaagtgtggacataatctatgaaggtttctcttaattatagtaggaataagtattctaaaagagtgagtttagtaatttaaggcaaaatagaccaataagaaacaagataaaatcacttggtaacaaaagtataaaatccactaaacctaagctattctatgtaaaatatttgtggagattactcttcaagccagaaatcatatatataacatgaagaaatatgtgaaaattggacacttaatgaaatcaaaataaatagaaagcaagtcatgatagcattaggaagtttttgttttaagaaaattgcctccttgattccttagggcacgaaggaagctctaaatattattttaaagatcccaacggtcaaaacttagatatataagataggaatattcttttaaaattttaagaagatccaacggttaatgagctcaggatgaatatttttgtaacacgggtttaggatagaaattgtatgattaagtctaaagctactccatggtttgtttaaaaattaaaaggcaaagtcccaagcttttgtgagctgcacggccagatcaagaaaacaagagaaaagtatagaattctcttgaaacaagacacttgttaagtcttaattcaatagccaataaaaggaaggcaactaaaagctagccaattatgaagccttggatattttacctaaagcaaatggcatctagcatataaaaaaggagaatgaaaccaaaattgaaggctagtgcacgtacaacattttaacttcagccatatcccttttacttacctttctatttaaaacaaaagccaaaacaaagaccacactcttgaagaaatccacgtaaaaaggctagagcaactaggacaaagtggttgaattcaagtttaaagaagcaaaggtatggggaagtatttggtttacatggtttagatagtcattagattatgctactctttatttccataggatttaagctatggtattcattatttttacaaaaataaagtttgtctaccaagtatttgattaattgccttaatgaatctaaaaagggtaccaagatgtttatttaaataattaacattaaaagatttaaagaatgattaatttgattctaatctaataataaagtgattaagaatatgtgttccttggtgttgttgattattatttgattgctgttaaactatggttgaattaaagtttttatgctatattgttaaaaatgtttctttggaagattggatgatatttggctatctgtaaaaatattatgtgttgtctgcttggatgttgttgtctgtatgttggacgtctgtttgattaagttactgtattattattaagccgctgtatattggtatattctatgatgctgtatttaatgggttgctgaaataggttgttgtatgctgttatataatttatcatactgtatttaattagaacgctgtatattattttatttatgtgctgtatgctattcttttatccacttgatggtgagctatgataaagttttatgttctattagaaattaagtcgggaatatatgattaagaatcatgttgcatattactaaaattacttctttaaaggatttatggctcacttgtatcctttatatggatttaagcatgatgaatgattattgaatccgtgtgttgctgagtttttccatacaaaataatatcttgaatgaagatgtgccagattcacattaaatggttaatgagtatgagaaatgaatttaagattaatgataaagcagaataaataaaaccattatgcatttcatatgcatatgcctgacgggggttaatccgtggagttatgccttgcgggggttaatccgtggagatgttgtcagatagctaaactgagtccacgcgttcaaggtgttatgaacttgggggtagttgagacagggaggaccacaccaccatgatgatcacataggtggaggtgactatcctatgcgcccctgggctaccctgactggttggataagtttatttgtttcaccggagtgggtgaggctatctgactgtggccactaatgatgattttatgagaagctgagatctcagtcatgcatcatctaataaagaaaacatgcatcagccatcctgaacatttatttatgattattttacttttattctgtattttactattttgtgctgataaacctattgatctttctaaactatgtttatcatgtacttacccctatttgtgtcgatggttgacacctgtgatgaccccaatttaattgggcgagcagaggaacagtgaaaagttgaatgtgatgaagaatcttggatgatttgcatgctgtgccgtggcttaatgaattgttgtactagtctgctgctgttgcctctgaaattatgtaatatttactagactgagttgtacacggactgttatattaaactatgtctgaactacttagactatttgttatgatgaatttttcaaacatagtaaagcgcttagaatagtgttttgtgaaatcaaaatacgaagaaaaaaaatttttgtaaacatgtacaactaatttgattttaatacaaagtggacacagaattctatataaaatcaatcaagcacgagtaagtaaagagaggtgttatattcctaaattaggggcatggagtagacttacccccctttgtttccttggtcacatcatgcgtctcttcatagcatcgcgatgaacatcattatgcattcatcatttgtcatattcatgcactacataagtcattgcatttttatacatattcatatagcattttgcttgtcccagcaatttcatacatcttgtcgtcatcatttgcatcccatgttcactaatgcatgattcaaacatatatttgttcatgtcttgtattctcctctgtgttgccaaaagtcgcaatggagcgcgaaagcttacatcgtattcttggttacgtgtgttgagtaccatgatcatgtccataaacaacccatgtcggagttatacactcctttttcttgaaagtgattgaagaccacatgaacatggtacccaacgtgtttgacaaaaagaaatggtggtcttttgagcgtattgagccgatctcataaatgcatctgccatgcatagcataagtacgtcatactcattcatcatatcttctctatgataggttgttgaagtattaacgatcaaaacttccattcccaaaacatggggtcaaaccaagcacagccttttaagaaaatgttttatcaagtcaaggtaaaaagtctagaagtaaccagcttgcaaaagttggggtagtggatggatcaggttttcatatcctctttgactactaccggcacatgattaagctaaagacttaaataattgagaaccactgatgtgttcgtgttttatttctagttgtactttgactctgataagatgtaatgaacaatcttgttttcatgaaaattgttgatttgaccttatgttctattgagtgttttgtgtaaaattcgcaatacttcagcaagttatcatttgcatgcatccatgtttatttgttttgtcgcattgttatgcatcgctcattacattctttccttgaaattagaagaaaaaaagtaaccattgtgctaagaaataaagattgcgctttacgacacccataccagacgcgtggcaagactacaataatgagtaacataaaacaagttcaggagcaaatgaaggctaatatggaggctatgaaagagcaaatgacaacaatgatggaagcgatgatgagcatgaggaagatgatggagatcaatgctgccactactgttgctgctagtactgctactgaaggggacccaattcattctcccaattctaatcaagagagtagtccagtcttaggtgtagtacttcaaagagccgaggcagcacaaatatgggcctcattatgtcctagtccaaagcaagacgccttttccaccatatggtttgccgcctaattatacaccaccttttgttgtatacgctcctggtgagaatagcagtagttctgcacccgtactaacaaagaatcaacaactccaacctaatcatactcatgcccatgttcctcaagtcatggaagaaacacatgcagctccccaagaccacactttgcccgatttcggggtttatccaagatatactactaaagggcagacattttcttgtgtccctatgctaaacgctcaaggagcttctcatcatcaaccaccatcacaacccttacattttgtgatggggggagagccttctgctgtagccaagaaggaaaaatttgatcatatagaggagaggttgagggccattgaagaaggagaaaattatgactttgttaacatgtcagaattgtgcttagtacctgatgtggtcattcctctgaagttcaagttgcccgattttgataaatacaaggggacaacttggctgaagaaccacctgaagatgtactgtaggaagatgggggcatatgcgaaggatgaaaagctgctgatgcatttctttcaagaaagtttgactggggcagctattatttggtatactaacctgcaatcctctcgggccgctcctggaaggatctaatggatgccttcattaggcagtatcaatacaattcttacatggctccagatagaatgtaactacaaaacatgtgcaagtgagataatgaatcattcaaagcatacgctcagaggtggagagacctggcagctcaaatagtaccccccatggcggagagagagatgataatcatgataatggacacattgccagtgttctattatgagaagatggtaggttacatgccttcaagttttgcggatctagtgtttgctggtgagagaattgaagtaggtctgaggaaaggaaaatttaatcatgttgcttttgtgaatcctagtaataggggacctgagatgagtgatgagaggaattatgaggaagaagctcatgatgtaactattgttcctacgtggccaaaatttccacaagccctttgtaatcccttataccaatatccctcccccagcaatatcactactcagccaatatcagccctgtccactacccaccaccctatcaaccaagaacacccaatcaaccacaaaggctacccctgaaccagccacaaaatccacctgtcgcactgccaggacctaatgccaaccaaaacatcaaccaaggaaggaatttcgcagaaaggaagccagtaaaattcactccaatcccaataccatatgctgacttactctcatatctgctcaacaatgcaatgatggtaataaacccagcaaagattcctcaacctccatttcctcgaggatacaacccgaatgtggcatgtgcttatcatggtggagtctcgggacattccactgagcactgtatgtctctaaaacataaggtgcaaagtttgattgatgtaggttggctgaaatttcaggaagataatcccaatgtgtaagctaacccactcacaaaccatggaagttcttctgtgagtgctataaaggatcaatagacatagaaattgaggagaaaggaaggatcttttgtggtgaagaagactttctcagttggagcactgatattgacaaacttggatggtgaagagttgtcttcgcctataaattttgatgtaatcaagcaatactatctgtgatgcttggggaaatttgaaggttttcttttggacgtttccagggacttattaggattttcatgtttatgctattattgtaaacaacaactgcaacgttaaatgccatcatctctcattttcctcacgattatatctttgcatttattcatctttcactggaatatgaatatatgtcactggtttgcttgctcatgtgacctgtgcttcataattgacctccaagtcttcccaatcagaaatttgcgggttctacacgtttggtgggggtgccgtaagcaatgagtaaaattgaataaacatttgattgattgtgcttcaaataagataatagatacatgcatgcatgtgacctcatcttgtctttcttaaaagttttgtgaatagtgagagtcatttgacttaatctatcaattaaaaatctttaaaatatttctcacacttgaaaattctctttcgacaacctgcacaacttctttcatttcttcttttcattcatttcttcctttctattcatttcttcttgctataaaggcatgacagacaacaacaatggatacctccaaaccctagaccggggcaatgatagataccccgcacgagctccaagcgaacctaggggcaaataagaagttcttacccggtaggttgaaaacccgaaagggcagcctaggcaaaagttagggtatgtaaaaaaaaggataaagaaaacaaatcacaagcgtttgtttatcagaggtttttatcccaaaatccaaactgtaaaagtctttagtcaagatttgaaatgacacatggccatgtttctttatcccaaacaataatttatcctttgctacccactccgagccaaaagtataattgttttctaaaaaaaaaagagaaaccctagagtatgaaccactgtcaaactggcaagaaaagcgatgcaagcaacatatgcatgaggtttactaagctcagggttgggccctaaatgatgttaaagaaagcaaatccgccaaaggcgagcgaagcaaaaagagacaaaaagttctccaaatttcacaaggcacaaaagtgcaatgattgtcaatgcataagacaaatggagtaaagcccaacccaaaaagcttaaatgaatcaaagcactcaaggttcttactctattgtaacccttaaacactctttgagcctctttgacctttctttcatagcccttttaacccctggccatgttacaagcccaataaagcccatgtggatcaagggaagactgattctacttttcagtttggattctggaatggaacatatacacactggttttcagcttaaataaacatttgagaagaaagctcagccaacaaggagctcgtggaagatgcccaaagaaaattggggttcattcaacgtcagtctctcatgcaaagttcctagggttcctttcgaatccaaggacagcctttgttgcataaatcctttcgggatcagcccaaaaaagtgcaatgattgtcaatgcataagacaaatggagtaaagcccaacctaaaaagcttaaatgaatcaaagcgctcaaggttcttactctatgtaacccttaaacactctttgagcctctttgacctttctttcataaccctcttaacccctggccacgctacaagcccaataaagcccatgtggatcaaggaaggactaatttcgcttttcattttggattctagaatgaaacatgcacacgcttttgattgttaggataaaaaaaataagaaaaaaccaaggttcgcacttgaacatttgagaagaaagctcagccaataaggagcttgtggaagatgcccaaaggcaattggagttcattcaacgtcagtcgctcacgtagagttcctatggttcctttcgaattaaagggtaacctttgttgcataaatcctttcgggatcagcccatgtcatcaagcttcaacgggatcaatggactcatggcatccctctatgatcttaaattaggaaagtttcacttggtcatataccaaggtgtaaatatccactgccatcttccaaaattgccaagcaattagatcaaacagaacatacactcaacgtcgtttcaaggtccaacaccttaacgactctttttcatgtgattgaaacaaatctttttgggaaaataaaatcaatccaatcaagttttttttacaaagaactacgtaagtatgatttcctcattgcacttggggatacgtaggagcaagggcaaaccccttgtcgacctaaaaaactaaaaaaatatatgaaaacttctgttctaaaaaataaaagtttgatttctttttctgaataaacaaaaataaaacaagcataggcatgttcttaagggaagataaataattttaaaagtcactttatttgtcacacgctctattaaaggttgtcgtcttcgtgacagacgcgtggggtgctagcaccttccccgtgcgtaaatgactctcgaatcctttttctctaaaatcgtagaccatgccttgtcttttggttttctcgacgttttccttaaataaatgttggtggcgactcccctctagtttcccatttttttgaggaactttctaatcttctctttttcgtcgtcgtggccggataggttgcgacaagctatggatacaacactctagttgtcacaaaacaaagcagaagttgtgaaagaaacatgtaattcaatcaaaagagcatgaatccaagtgagtcatgtagaagtttgagctaagcttcgatattcaacttcagtgctggatctagctgtaactttttgctttcgagaccactaggaaatcaaatttggaccaagaaatatagcagaaccggaggtagatagcctatcatccacatttgatgcccaatcaacatcacagaaagcatggagagacaatggtgttgaatgatgcaagtagactgaaacaaggaaccatgaaaaatagtacccttaaggtaccttacgattctcttaaccactgcccaatgagaatcaagaggtgcagccataaactaacaaactttgttgacaactctggtctagtaagtgtggcatactgcaatgcacccactacggacctgaataatgtaggatcatgaaaaagatcagctccatgcttagacaacttgcaattagataccatgggagaagagatggagtgagcttcagccatattagttttgtgtaacaaatccttgatgtacttgctttaagtcatgataatagaattgttggacagatacttaacctcaagatctaagaaataatctagttgaccaagttgctttagagaaaaaaaaaacactaatcaactcagaagtaagctgttgaatcagaatgttagaactactagtgataataatgtcatccatataaaccagaagatatacaacctgcatttgatgcttgtatatgaacagagaggaatcacacttacttgcttcaaaaccaaactgaattaaagtagacctcagcctatcaaaccactgcctaggagcttgctataaaccatacaatgccttgttaagtctgcagactaatgatttattagtagcttcaaaaccaggaggttgaatcatataaacagattcttcaatgagctcattaagaaaggcattattcacatcaagctgagataacttccaatcatgtgatagagaaatggtgaggataattgtaagagtgacaggcttgataacaggagaaaatgtctcatgaaagtcaaaaccttgaacttgattgaacccttttgctactaacctagctttgtatttgttgattgtcccatcagcattttctttcaccctaaacactcatttgcaaccaatagcttgtctatgaaaaggtaaagaaaccaaatcccaagttttatttttcattaaggcatcatactcaacttgcatggtagcatgccaatctgagttggcaagggcctgttttacagtttttagttcaaaatgaacaagaaacaatgaggggtgtaatctaggattatgaataccagatttagacctattttgcattggatgaatgttacttgaaatggagtgaggagtaagaacatcagaaggtgcaaaggagggtgcaaaggtagtggcaatctctgaagagacatgtcaaacagggatagaagttgaagcagtagttggctgtgacacaggataagaaacaataggatactgattgtttataagagagaaaccagaaggcatagaaggtatagattgtggtgtagaaagggaaaactgtgtatgggaaggttttgacaacataggaggaggagacagattggaattaagactaaagtatgtatttatattactaacaagatttgtgcatgaagggaaaaggtcagaatgaggaaatttttgctcattgaacaagacatctttagagatatagattctgccagaaggtgacagccatttttaaccttatgagaattagaatatcctaaaaacaaacattctggagacctaaaattaagcttgtgggtgtggtaaggttttaaaagaggaaaaaagacacaacccttaaaatagggatttttatgaaaaagagtggtgaggggaatgacaaaattaagagaggcagtaggaagcctgttaatgagataaacaacaataataaaggcataatcccataaattcagaggtaaagaagcatgatgcaacaaagtaagtcctaagtccactatatgcctatgttttctctcaaccacaccattttgatgatgagagtgaggacaaataagcctatgaaagataccaaaagaggttaaaagagtggaaaaggtctatattcccctccccaatcagactgaacaatctttattgtagtgttaagttgtaattcaacaagagacttaaagttccggaaaacaaaaacaattttagctttggacttaatagaaaaaatccaagtatacttagagaaagcatcaatgaaagacacataagatttgaaaccagcataagatgttatgtgagagggtccccataaatctataaaaaccagttctaaaggagaaagtagaattggatgatggcaacctatgtgactttcccatacaacatgatgaacaaaaatctggaacaattttatttaattgtgaaacagtacaactgtttaggacaagtctcattacatggttatttggatgtcttaatctagcatgccaaacatgggaagtactaggaaaagaagtaacaaaatcaaaagaaacagtagatctactattgaaaacaacataatgtttggacaagttgtttgctgaagaagaagttgaagtggacaacaactgagcagaggtatgctagagctagatatactgaaaatagtatagtccatcagctccaacatacccttgaaataggactttattggtctcctgtgatttcacaagacataaatgagaatgaaactcaaagaaaacagaattatcttttacaaattggctcacacttaacaaaattttgaaattgagggaacatgcaacaatttgtgtagttaaaaactgaaatgattatcattaggaaacataaaacatgaagaaccagcaccattgatactcaaaccttcaccattgtcaataaagatttgattcggaccatcaaaatggttgaattgcttgatgtgttgtgactcaccagtcacatggaaactagctccataatctagaatccaagtgcagccagctagatcaccactagaattagtaagcatggcactaggttgattctcagattgagcagcaagcttataattaggattagtccatgtattagatgacctagtagatcccactaagtatggaattgactaactggtgtagggatgacaaagtaggccaacacactcaaaacaggttgggctagcccaatccaccaaaaaagcgggtcaggccaggctggcccacttttgcaaagtggactgaaaatgctagcccaccccactttagagtgggttagtgggccagcccaccaaaaaataattttttttaaaaaaaagcaaaaaaaaaattattgaaaaaaatgtaattaatttatggcattccaaatcaaatcaactaccttatatggcattccaaatcaaatgaaataaagtttagaactatagtcagcataaccaattaggctaggattcttaagatccaacaagtgcaatcaaaacatacacgcttttaaacaaaatatcccatgggcttcaaatcattatattcaacttttctctaaaaactacatcgtccattgcccagcttgacatggattaacatggtcaaaatacaaggttattgaccccaggctaagcaagaatgcaaactcattttataagtgaacaacatcttgataaaattttagaagatttgaaattgatcatcttccccaaaatcaattctctctataacacttaaggttcctctaagtaacaacaaattcagattgccaaaacctactgtttgatatcaaacaaatgcttcaaaatgaaatacaaaaataagaaaaagcaattggatgatccacaaaataaaaccacaatgaatatcatttaattcaattcagtgcaacacatgatataaatagagagaaaaacgtacattacaaacttcaccagtaaaaataaagtaatttagtttacacgctatttaaatatagtattaaatccaattaaatcgaatgcattataatataagaaaaaaacttatctaaaatatttacaacatctcatcataagttatagtatggtcaaaattatatattgttggtcaaaataatctcacgttttctaaaattacaattccatattcataatttatatacagtaaattatcaattctctttaaggcataatttttcttttggtgtataatcacaacaatacagtggactgcaaggaccacaaagatgaagactgagtcacggagagtgagtagacagtggactgcgatgcgggtgcggtgtcgaagtgaaggaagatcctaacaggaggccgggtgctggtgagagagaactgaagtgtgaagtctgaagtgaagaatggaaggtcttggaagctgttgtgctctgctggactgctggacaaaatcacaaaaaatgaaattaatatctccctcttggtccaccaggttggcccgttttggcctgcatttttttgggggtgggctggctcggcccgtttcatatagtgggttgacactttcaacccggcccaccttttttggtgggttaaatgggctagcccgttgggttaggcccattttgtcatccctagactgtggtaggatcaaagaaagcaatagattcgtgagacttgaaagttatatatgactgaaaatgacacacatttgcagtgtgcccaaactttagacaaatctgacattgaaaattaccaaatctgccacccccacgacctcgatcataaggacttctagaatttatgtatccttgagtatagtttaaagagggagagctcaataccagagcttttttgttatatctattaaggcgagtctcatgtccatatagaagtgcctctatttcagcaattgaggtttccttcaataattgagattactggggcctaatcggagggaagaccttccagcaaagcatccacatactcttcatgcctcaccagtactccaactccaactaactcatcaacatagccttcaattttccttaagtaatcatcaataggttttccatcaagagaaactgctctcattgcaatgcgtagttgacaagcttgggatttagtgtgtagactgaagtgtttgtgaattttgtcccaaacctggtaaaagtgctcagaaccaagaacacaagacaaaacaaactttgaaagagtcggttgaagacaaacaaggagagtttgatcttgaacatcccaggcttcatagtctagattaactctatcaaccacttaatcaacttctttgagaaatctaggcggaattactggatttaccacaaacctttgcaacttatgtgacttaagaactagctcaacatgttgacgccagtgcgggtagtttgaatcatccaatttcacaacaattgaattcagaaatgtgtgcaaaacagaatgcacaggagcagaagccatggaccaaagacaaacaaaccagtctgaaccaaacagaagcacaagaaatcaaccgcaaaagataaatcaagtcaaacgaacgagaacaatcacaaaaaagaggttgcgagaacgaataatgaatcgcaagatcaaacaacagctatcgcgagaacaaacaacaactatcacaaaactgagagaagctgaatgtgacctggaacgtagaaattggtgcagtacaaaatcacgaacttgaatacaaacgcgaaacctagattgtgagagaaccagagatcacgagcaagaacaaacagaaacacaatcttgcactcgcgtgcaagaaaaccacgagcaagaacgaacattagcacaatcttgcacgatttagtgcaaaaacttggctctagattccattttacacaagtagaagagataacagaggagagaaaatacagaactgaacttcttatattattcagtatagaaaagttagttaaagtaaattacaagagaggtttatataacctctgaacataattaactaagctcctaacaaaattcactaatcacctaatgtacatagccgtagacaacagttgttacacttttacagatatagaggtggtgttagcaaaaactaactagcagttacaggttttacatttgttaaatacaactgtaataaatttgaaatctaattgattatttaatcaacatactatacattattcaattaatttatccatcaacttgtgcatcacacgaatgatcataatcacaacttattttttttgtaaatataaaaaattctttataagtattgttcatttataaaactttttatgggttaaatggttaaaagttttataaaattttataaaaaataaaggtttaaatagatttttatttatgtaatttagtattttttttcatttttgtccttgtaatttttttgttttagtccttgtaaaatatgtttaatttacttttcatccttaaagaacattagatagtagtttgaatagttaaaaaaactgttttgaacaatgaaaaaaatgttatattaagtgttttagggacaaaaaataaaacaaaacacattttgtaagcactaaaacaaaaaaaaaattacaaggaagaaaataaaaaaatcactaaattacaagaccaaaaaattatttaaaccaaaaataaatttaaaaattcagttttgaaatatgttaaaaatactaaaagtaaaagttaacatttttgtcaaaatactaaaagtaccaccattcataaatataagactattttttatttcatttatataagattgtttttaagttttgtgaattaatttttttttactagaatattattaattaccttataataaattactaataaaataaattcattctctctcttataaggattgagaagagtaacccacattaattaagtaggtagaaaataattaagtgaaaaaagtgacatgataagtccaataatttgattcaacaaaagaaaaatgagtccaataatttaaaaataattttaaaaaataatataaattacttacaaatttaatacttttttaatagacaaacaaaattcaatacattcaaaaaaatactactaattaaattatccaacttccttagaaagtgggaatttatgggtcttgtagggagggagggagtaatttgatatatcatgttattcactaataaaattctctgcattcttttaagaagtatttacctatcacactattggatattctataatttaattaaatctaaactaacaacttcaaacaaatatatagataattaattatcaaagctaattctttaaaaaaaattaacaaattaaagctaatataagttcatcaatgagaaatatatatgaaatatgtactatactcagaagagaaaaactatatactataaatgttacacgtatgatgtccttttattgttcggtacttggataattaatgattcctaatgatttttaacttgcttaagaaagccttcattgcataattacatatattaaattttcaataatttcacattagagcccatgacttgctaattataaaataaactaaaaacttgtatttatgtgggagaaaatatataaaataatattaatttcataggagtaactaaccaatttgttaattttatattataagacatgttaatttttaaagtatgtattaatataattgagattaatataacacatattacttttcatggatttgattactatattatgcataaagggcgatttacattccttatttctccgctgcatatttgaaatttagcatatatcaacaatgacaaataactatgccttgtgaattttttgagagaaactatatcctcaataaatacatgaaaccatatagattttcttgattgttaaaatataaaataatgaggattaatgtaattaataggaatatcatatcctgtgattgattagttaacaaatgatgttctacctaattaatgaattgttgacacatgcatagataatggataattaatttacataatttgcatgattaatgagccgaatttgcatgctaaagaggcaaaacaatttctttagaaaacttattcgctttaataataagaaaatattaggtttagttgcacattttattttagaaattttatcattcaagtttttaatacttacaaattttaatgatttttacatatcactaaaacatttttttcaaagagacatcatttgttattaacatgatagtaaaacgcgtaaaaattaaaaattaaaatgataaaattcaacaaaaaaagaacttgagtgatgaaatttacaaaaattgaaaatttaagtgataaaattcacaaaataatgacaattgaatgataaactatacaataaagcataaaaattaagcaaaaacaatttcaattgattatataaaatattattttatatggtatagaaagtaaaaataaataaaagttgctttttaggctccaataaattcatagtgaaaacatatatatcatttatttatggttaaattatttttttagtcatctaatttatttcttgggtttaatttggtcttctaactttgtaaatcaatttaatttggtccttaagtctagattgtaagaaatcacactttgtagtagttcaaaaccatcactaagtgattttaaatagccacaaaatatacatttcccaaaaaatgaattacttttaaaaattagatgatcaaattgaacccaaaaaaaggaccaaaatgaatcatttttaaaaattttagatgaccaaattgaacttaaataataaattaaagggaaaaaaattaatttagctttttttatacataactaccactctttatcaaattcatttcatttgaacaatcttatcagaccaaattcacttattaaaagaattttatcataaataaattcattcaaattatacatataatttttatgttattaacttttgacttatcatccaagaaaatttaaacacaatgtataatgaagcaattggattattatgttgaaatatattcaaaagaatgaaattgcactaaaggagagaataaataaagaacttttagttgatgacgttaaaaaaaatatatccttttattgtaatataataaactataaataattaatatttgtcatgtagttgattatgcctaaacacaatcaatcttcaatagcagggggtccaacacacttaacacttattaataagcaacacacaatatgccattagcatatacatgcatatgttcaatatgaagtaggcaagatagaaaataagtgtagtcattgtagacacacaacaatcacacaaaacccctcatacacctaaaataaggttcaacttaattgtgtgtcaattgcaacataccaagcaaacgtacaatttgatacattggttcatacaccagttcacacatattttttttacagcaacaatgtaaaattatgaaaaacaagtatcacttccaataatatttgtaatgctttctaaattatgtactacttaactattacaaatgaaaagttattgagttaatgcaaggacacatggagtgaattttaatgtgaatatcaatgttgtttattcatccaatctagatattgaaagtgttagttgctgaaaaataaatacttatgaaagtcatttcatttaattgagtaaattgtcgtttatagttcctattagtttttgttatgttgttattcttattcttatgtgataaatttgtaataccatatcttccttgatcaatactatgaagtgattaaacatttgaagacttgagttgtttgcattacatatgattgtaaaaccccttgtctgttattataatttctcttaatttattttcaaaactatgaagtaaataaataaatttaaaataaattgtccaacattgtctttggatggggtagcaaaacccttcaaaatgcactggaacaagaattattattatttttaattagttgcctaatacaatgttggtagtatttttttctcttttatcattgacaaatgttttatttccaaagtattgatataatttcaaatgtccaattgagagaaaagctttataaatattatttaatccatttagataacaattatttgaaggataaagttgaaaaaataggtttcaaattcatgttccaaatcactcatgggattatgcttgttaagtaattacttattgcattagcaagaaaataagaacaatataatatttaaattaaagtcaaacacaattgaaaaattagttggggatgagtaaattgttctcaccaggttaaatgaacttaaagataagaaacaacaattggatgaactaatttagagaatcaatgcattcaaccaagaacttaattttaaaaatatccaacaatatcagggtcagattaatcaagtctaacgaatgatagtcccaccttggcctaggttacatggtcatgcaagattatgcatgtcttgagtgtaatattgattaaatcaagagttacacttgcttgaaaattcgccactttgacaaacttgcactcaagtttgacacatgtaaaaaaaaatgttcaactaacatatttggttttatattaacattaatggtaatctcttttatacatggttgaaaatccaaattgtgttgcattcctcagtaattatgcattattggcaacatatgtttttatttaaaaaaaaaagaatcacaagcaatgtgaataattatttggtgtgcaattgcgtgtatcttatggaataggaatatgatattcaatgaaattaactttgtgaaacaaaatgtcatccaagagattttatttcatttgttgttataaatgaagaactatcatacatctttctcctattcatatgtacaatggtgcatgaatcatggtgcttccatgaaggtgtagtgcaaacctcattactctatctgaagtggtgaattggtcgaccatgggttgacatgtctggtatattttgggcttgaacttatatgatagggataatgattaattgtcaaagggtatggataacaagtgaggcaatgggtagcatattgatttgcacgaaagttattattttgttattcaacaattcatttgttggtaatgattgggtgattactccttatttatatgtcatcaatgacataaatatctttaaccaattttactctatgatgcaactttataaactattatatgtatcaactatttgctaaatcacacatttgtgtactcattttttggtacttctagtacttattaatacaattatctttttttagttgaaaaataataatctttttacttattcaacttatatatatatatatgtatatatgtgtatatatatgtatatatatatatatgtatgtatatatatttaaaaatgtttatgtgtgttacatatatattctaatatttttgaacaaataattttcttagacaacaagtctataccatttgaaaaaaaaatggtaattttatggtagatttgttgtctaggaagattaatagttaaaaatgttggacttgataaatgtaaaagaaagatggagtgaaagagcttcaactttttttctttgaatttatagaaagaaaataaaaattataattaatacaattattgtcaactaagaaaagaagatacaacaaaaaataagttttaaaagaagaaaacaataaaataataacaaatagaaacttagaggacatagattttatataaagaggatagtttatcaaatgataaatgttgttgaataagacatgtaaccaagtattggtattgattaaagtatgttaagatcaataaattatatatatatatatataatgtggaggtatcaacataacctttgattttcttgatatataaaggttaagatcaactattaatacaactattatatttcaataaaatgaatgataaggatgaagaataactcttaagtgttattcttagtgttacaaccatcatatatatgtaggagggatcaaattacactatataacttttgatagactattacatcattcactaattttaactggataatttttttcttaaaactcacaaattgaataaaagtttctttcatatagatcatatatacaaaattttatattattaatttttttcctcattcatatagattaaaatcgatttaatataaaattttcaaatatactaaaatatgaataatttaattaccttcttatattgttcaattttagtaaaaattgacacaagcaacctcgataatatgtacatataattcaatagttggatcaatgcaaatcacatgctatatcaagttataaaatggtattatagttatttaagttacactagtgtaatttgatctctccttatatatatatatatatatatatatatatatatatatatagttgaacaagtgaagaaattaccatagatgctaacacgtaatcaaatattaaacatttatttttaacttgcaccatacttgagtgcaagtttgcccaagtgataactttttaaacataagtcttaatttaatgaacattgcatagaagacatatataagctatgcggatttattttattttttttaccattttgtatgatcatgcaacctatgacttataagacattcgttcaatagacttgattcacatgatcctattattgttgggtatattaggttctaggttgaatgtattgattttctaattagttcattcaatctttgtttgttatcttggggttcatttaacctaatgagagcaatatactcacctttaacttattttcagtcatgtcatccaaaataattagtttatcatccattagtaaactagttattctgaaaatatctcaaaggcaaaaaacaaatttcaagctttcatctaaccctaatttgaataacataatacttgattcatatttcttattagtgcaataagtgatgacttaacaagcgtaacttcatgagtaatttgaaacatgaatttaaaactcgttccttcaagtttatcattcacaatattgtttaactagactaaataatacttatgaaggttttatttcaactgaacatctgaaatttgacttatgatttggaaacaaaagacttgctaatgataaaattgaacatatactatcagcaatgtatcagacaattaattaaacaaaaaataacatgtgatctaacatgaaagcatattagtgtaacaaatgtaatatcatagcaatccaagtaaaatatgctaaaatgtattaatgtcaaacttttccttctaataacttgttatattgggtttaatattagaaaattagttctacatgataatttatgtttgtagagtttttttttttttaagttgaatattctatttattatggtttttctactttgagattgtagttggttcttgctaattcattacaccaaaaaattcttattctgattttgactatttaatattgtattgtgtgtaacacataaatatcataaaaacaagatataaaaaataaaaacaaataaaaacataagaagaaatgttgacaagtcagagaaaacacttaatgttgcatgaggctagcaagagagaaagacaaaggttaaataaaattaatgttattcccactcattaaagattgttaaaagaaagataaagataatgtagtctaaagagtagttaaaagataaagttaaaaattataaactttaagaactaatataaaattaaataatgtataaggtaatgtttatactcatattaaatataatttcttttgatgataaaaaaatgaacttataactaaaaaagatttaatgatttgtggatattagtgctacataaatttaaaagccagagagacacttaaagccacaatatgcacatgtaagaattaaaactaaggagttaatactaatagaagctagcttccagatatttttttacttattaaagttagttttcatgttagtttacataaacatgtagcgaaaaaaagtttttatatttaccaataatttttaccactaaagacactatgtaataaatataatttttaataaaagtgtaaagattcttaccaactcaacaaaatgttgaaatatggtagtcaaactcaaagccctaatttttctgtcaaaattgaaacaaataaatcctagaatcttgcttttataacatgcattgctaaaaaatctcaactagcttaagatacttaacaaagataaaaaaaatttgtacacaattacaatgggttgccaccagcattaaagtgaatgtataactatttaatttctcatttaatccttacaatacaagataacaaaggtactcatataatgtaagaagctatagaaaataaaagaggtagatgaaataaaataaaagggtgggggtgggtttagtctccctacacctggttccaactccccaagtcctccccaccttccgattttcgtcgaggtccaaaaattagactcattcctgtccccgcttgggaatcgggtttccccgttgatgggttgctaatatatagtgaaatttaggatagttttagtcaaaattaagtagaaaatgttaaataaatgatagaattaagccaaaagttcagtactttttgaatattattaattattgttatttttatgcattttaggaacaataaaggaagaaactgacgctaatagcgcggactctacgggaaattcaaaaataagcttaaagataagataagaagataagctcttggggttttgctaacctatttataattagggaagccacagaaccttggaggacaacttttcatatgcagagacactcagaaacacagagatacacacacggaggctgaagaacgcattaaagagtgagaagaaagccaagattgaggggtttgattattcttctattttgtattctgtctcatctattttctcatatttatattgagctagacatactatgtctagctaattctctgtgattgtggtgaaggccaaaagtcaatgtgaactcttgtgtttcttggattgatgattaatgaatagtgttatgatttcttccctttatcttgttcttgaatttataatttccattaatagatctgatcaatctgttagaggaacttagggctttaattcgcaatagatatattgggattttagtttctgaaagcgataaagggacagtttgacattacctagacatagggatgaaggattgcaaaatttttatatgtcagcttaatgcttaatctgaaagggggttactaagacattaggacacttgaataggattaaagggttaaaaagaccgagaaatctgggtttaaccaatctatgaaggtatatctttgagtaattataacaattgcaattaagtatcaattcaatttacataaggagggatcaaaggtgattaggttttcatcacaattattctttattactgcataaattcccataattaattcttataatttccttttatttaaattctgtttttattatttaaatccaatctcaaattcaattcctttttatttttattttccaattttaagataataattacaattacattagtgcctcaatcctcatggagacgatactctacttatcaaaattattacttgaacgatcggtacacttgccgtgagttacacaatcacactttgtgaacgcaacacccgtctcaccctatgctcgatcctatcttgttttttatcaataaaaaatggagaaaacatgacaattttttttgtaattggattgaatatgttacaacatgttaaattgaaatttcaagtaaaaatttagtgatctcatttatttttggatagcttaaagaaataatgatcatgacaccttgtttaccaaagttgaaattccaagtgcttaacaacacattaagtaaaaattgcttgctctcatttatttgttgagcttaacatgaaattaagtaaaacttatacataattataaggaaaaacaatagttccaaggataaaacaagcattaatccattaaaattgataataggaactagggtattgtaagtttataatagtaatttaaaatatttattatattagaataacaatgagacaggggcgagacgaggaccaacatacctgatcccatcaccaaacccaactttctcaattgagaaaaatctgaacatgaatccaacctcgatcaatttgatttttcctcgtcaaactcagggtgtgtctaagtatgtccccgtggggacatgtacacttgtcatgcctatacactgttaacataaatattaaatgtataataattttcattatataatacaaaatatataatatttaaaaattaaaataaaaaatatttcttagaataatttttaaaaataaaaatatgattaataagcccatgtatcactacaattacacattatgttattgatgaagaaagacataagagcataccaatctaaaagttagtagaaatgttaacattcttttgcattctaaagaaaaacataaatattggacatgataacatgtaatttgatctaaaaatgcaaacaattaaattgcctatttaatgtactagaacaagttaccaatgaatattagtctgatttcacataaagattatatgaaatctactatattcaaccaagatgcaaaagcaagtaacaatgaagagtgcaacaattcaggcatttcaagctttaactccatgtatgtatgtacgtatttattaagcataattgaatttatcatacaataaataaaactaaaaacatcataaattgggaggatacaatgatgaaatagtatatatagaatacactttgaagaaacaagacacgaacctacttacgaattattcattcattagttcttataaaaaaattatgtaaatttctatatagatgctaaactcttacaacaccttgtgcaccttgagagaaaaaactaaagtgttgagtgatatatttgtttgtaaaacgatcacataagtcaagcttgaggtagaacttgcttttgtaagaatcaaaagtagccatgaataatactttgtaacttttgataagttagtaaaaacttgctgggttaccaagaatggaagtagtctcaagatatagacaaaccaatataacttcttgtgttattctttattgcttttctttgtgttgattgacaaatagtttgaatttatttttagttcttatatatgttaacaaaactatttttccatcgtttgatagagcttttctcaaaagatctctttttgttttcaataattgtgacaataaacatgtttttgatcaaagtatagttaaaaatttctaaaaacataattcaaccccttcttgtgttatttgcttctacatatatacaaatcaacaatacatcatcttaactttcatcacttaagattcttagattgcccagggtgaactaaactttcatttaaaaatagaaatataagggacctagtatgtaggggacgaggtagaagattttgtgactatcctctttatgaggtaagcaacaagttacatgataccctttgttgttgaactaaaccaggtaaatatataagaacaaattatgaaatgtcaaaatgaacttgtgactatagacgaaaaagaatcattgagtgtcaaatccaaacaaaaacttctaatagaccaactagggtaaatttaaaactataattaagaagaattcaaaaagtgtggtataataccccagagttctggcgcagatgatgtggggtgccgcgcggatagcgccataagtcctgctgagaaaaccatgtctggtgtgtggcgtgatcagcgccagggttggcgcgatcagcgccagactcactggaacatggcgccaagggcgcgatgttggcgcgggaagcgccattgtctctggaggttggcgcttggggcgccatggtggcgcgaggggtgccagtgtttgcagccagcgccaggagcgccagggttggcgcgggctgtaatgcctggtatttctaagcatgtaattaagcctggattaagcctataattaagggtaatcattttggcttaggtgtttcagagaaaggcttgagaaaggaaaggtttaagctgtgccaggcaattggcgcgaccagcgcggactatggcgctacccgcgccatatgactaaaataggctaagtggttctgccacctcacgcgacatacgtgaagttggcgcgagtcgcgtgggctacccgaggatgtggcgcgagtcgcgcggtaatcggcgcgagccgcgtgggagtcgcggatgtgcttttatagatagcccatagggctgagaaagaaaaggaagaaaagagagagggaagagagaaacgaccattaatggccaagagagcttcatatcttctccatatctcatctaaacacctccgacccaactgagaaagtgatcagaaccccgagaggagtgaaaacccccgattgattcttgagaaaagctgagaaatagtgagatcagatttctcagagagaaccccggagagcttgagactcagaggcgaaggaggcccagatcgagcgagtggtctgagggaaagtgattccctggtgcttctgagcatcacagaggtaagaaactcgagctctgactgttggttctgagttttggatttcggggttttggggttatcttgaggggtgtttttggaagtattagagccgttattaggctcggactctgtagagtcttatgctcagaggactgttctgaggagtttagagccttgaatcatcattattgatgatttttgattttggctctgagacagtctgagcagagataaaaggttgactatttgactagtctggaccttagagcagttgacaaagttgctcaggagaagatatagatgagtttgaccggttgaaactggtgattatgagaagttgggttttggctattgtgagcagagacatgctctatgttagctggatcagagtcttgtggagactctgtagtctttataggcggagagatgatgttgtctgatgagctgatattgtgatgtgcctgaatggtctgtgatataggtgtggttgccttgtcagggtttgacacgaggtgtcagaggagcagatcatcgttacagaggctggaagtgcaggctcggcttgccaggtaagctcatcgttctgggggttattccctatctctcgtttatcacccaagtgaggtgattgtagcatgccatgcttgtttatatgtattcatatatgattgtgcatgctgaggagataaaggccttgatggccagatattgatgattgaatagttgatggcctagtgtgtgctgggctgagatggttaaacctcaggatagacaccgagatggtgtaaggacgtgtgttacctgtggtagtaggtatggccttgggccaagatagatgaacactgtgttgtgttccaggacttgatgtggtacagatccgaataagatctgtgatggaatctataggataccgcgagggtatcaggctagacaaggttccctagccagtggtagagtttgaggactccctggaatagctgagattccatgggaggtgccactgctctccgttaaagacctaaggacgggtgatttccttaggcagagatgattgaagtcttgagatgagtgatgcctcgggcataatatgtgtagttccgagatgagtgattcctcaggcattggttttgaggttctaggagatagagtgcctccttcgtgggacggtctctcctttgtgggatgatctctctcaggtggtggtgtgacaggctgagggatgagtgcctccgtcgtgggatgatctctctcagaccttgatgagaagacctgagggatagagtgcctcctttgtgggatgatctctctcaggcagtagagctgtaagacctggaagatgagtgcctcctctgtgggatgatctctttcaggcatgtgattatatcagcgtatgagatgtatctgttatataggaatcttccagacgtggttgtacctatatatttccggagatgcctctgatacatcctgccatgagatggtctaggatctatgcctagatgatagcctccgcatgatggtgctgataaatgatagcgtcctgccatgagatggtctagtatatattggatcctctgtgagttggatcggcgtatatacttagatgatagcctccgcaggatggtgatggtggatagtgacgtcctgccatgagatggcctagtatatattggatccgttgtgggatggatcggcatatatgtctaagtgatagcctccgcaggatgatgataggtgatagatggtgataaccgtcggaatcacatggataatgatatgtgagtaacctgattgtagtcaggtagacgcacggtgatggtgcatgagttgggaggtaacgcctctctagtatgagcagtgttcagttatgaacacttatgtgatagagtacctctgtgagagacctctgggagacggactctgagagtctataggagatgctgatgccatggttatggctttaagctatgtgagaagtatgaaagagccggtatagtatatggatgccatagtaatggcgtggctctatgagatgagttgagatggctcgagagccgatatgaggtgtaagacctctgatattactggatctggtgtgatgatccagggagagctgagatatgtgttaaagctaggttaaggtcctagatctagtatatatgagctggggtgacatcctaagctctgatgtgtgtatgtgtttatacttggggttaaaccagggaaagggaggatgtcccagatccctgagcttactgagatgtttatctcacccctgttgtgggttgtggttttcaggtgtttcctggggagaggagcaaccacatggagtaaagagtagctgagagtactggagatggtcatgggctgcagttgaagatagaagaattttattttatacctctgtcttgattttgtataagtaaagggagtgaatacacccgttgtatgtaatggttatgtttcctcctgactatctatgtatagtttttatgtatctgcctatgttttgaatgttgagtttctggatcagtagtggcttaggttgatgttttatgtgttgggtttatatttcatgcataatgatatcaagggaaacgattctatcgcttccgcaaggcgttcagataacgctgatagcgcactcatgatacttttaggataacgcaccgggtgcacacggggtgttacagtaatgaccctgattagcggattggggcgttacattatggtctcagagtcgtttcttgatagaatcactatgcatgaaatagagtgttgcttgtattgttgtttgatctgacatgagcttgacatgtgatacacggtatgtgggcctgatcaactcactgttttgtgtacatgtgcagggtcatgccgagatccagaaaccacagtagagcgaccagtgcccagtctgatccagtagctgctgcaatagcggccatgcagcaagagttagctgcgaataggcagattcaggaggatatgcagcgtgagagagctgctgacagagaaaggtatgaggccttgatgaaagctcatcaggagttgttagaggaggtcagagttcaaaggaggggtgacagagtatcccctacacctcctgtgtatgagggcgaaggcagtcgccatcagataggtgcaagtcacctgagaggggaccagataccccatggcgagacagagatggacagggcagcccgagggcggatgcttaccacttttcgtaagcatgaccctccagctttctatggtaattatgatccggttgccgcagctaagtggctacaggctatgcagaagatatttgaggtgatggaatgtccggatcatcagaggttgttatatgcgacttatatgctgcagggagatgcccatgagtggtggatgaccacggtagcattgttaagaggccggggagaggttctttcctggcagatgtttgaggtctgtttcctggataagtactttcccagggaagctcgagagcagaatcaggcagagtttgacagtctagtccagagggacatgactgtagatgagtacttggctagatttaaccagctggccaaatatgctcatttcaggagatccatgccagatgctgagatccttgcggctaagttccagaggggacttagagaggatattgagaggctggtgattggtagtggatctcgagatatggatagcttggtgagacagtgtcgccaagttgaggctatgctcagcagacatcgaggcaagcagcctatttgtgctgagggacacaggatggttagacccagagttgctgaccgagttgagaagggcagagagctgggagttgtgtcttcagctcagagacgtcagagtggggccaggcagagaggatttctgcagaggccaggtacaccttccaggtgtgatgcttgtgggaagtatcaccggggtgtatgccctacgggtcagctgatatgttatagatgtggccagcagggtcactacgcgaaagagtgtcctgagagggacaactaggcagagagagtctccagaggtactatatgagccgtcagagtgtctgacgagcgataaggtatgattttatacctgatgtatttatgtattttatatgtatgcatgtatgcatgtgtttgtgcctccatttgtggatggagagtaccacgcttcagggaagcggtgattgatgagatggatggttatggacctccctaggagatgatgattcctcctagttggttttctcatgttgagaagcctcagagattaggatattctcatagaccaaggggatagaagttgagagatcccttctatacctcggaggtgccatgtatgtgggcctagagggctctatgttagtgtgggtaggcgattatgatatctgcctttggtccaggtgttgagttaactccgccaggttggatcgatttcgcatgttgatgcgaggccagagggccggtatgcttgagacgtgtccagctgaggtttggacaagtgctgagatcttgagcatgatgatggtatggaggtagtccatgcctggtgacagtctttgactgtgacctgagtgagcagctcagagatgtgtatctgtcgaggacagaggatcatctggtctctagtgagaggaaccaagtttgatgatgatcagagtagcgcagcggtagtctgcgatgcccagccagtaggtggctgagaggactatgttagaccagcatgaaatctctcagtaggcacatgacttacgataagctaagttttcttgaggtaccaagagatagagctggtggacgccatccttattgagataataagggttggtgagttggacatcctagggccacgatgatgtgttcatatcctgataggatcttagtggccagagatgaggagagacatagccgatgatatggctagtgtctgatatgtcacatgagtagtgacaaagatctaaagtacctcaggatgagaggtatacttcaggaggtttggaacccagataagactttgtagagtctattctcctcggatgatccgatgcgatgagtcatcagatcctagaggatgtgttgagggtgagagtaccttgaagcaaggtactagctgggtagatacctgcctagatggagttcctggtcagtgatgatgaaccattgattttggtgaggccctgtagaggccagtgatacaggactctagtggtgggcagaggaaagagatagaaatagtctcttgaacctgagatggttcagtggactcttgagcagatccggtggatcagtgttagttgcgagagctcagagtcagtgtaaggatttgtaccagacacaaaaccctttatagtgaataagggtgatcagaagtgtctgaggttggttgtggttataagtgtaggatgggctttagagggagaggaggttgcctcccagtgatttgtatgacatgagagttgccatggatcccaggtgatagtgggatggataagccaatagtgattagattgagagaatctggcgaatcctacacgatctatgaggacatgtaggtcctgagtagaaccaggttaagcctaatggaattctgaggacagaattctaaaaaggaggggtgtaatgtaatgcctggtatttctaagcatgtaattaagcctggattaagcctatgattaagggtaatcattttggcttaggtgtttcagagaaaggcttgagaaaggaaaggtttaagctgtgccaggcaattggcgcgaccagcgcggactatggcgctacccgcgccatatgactaaaataggctaagtggttctgccacctcacgcgacatacgtgaagttggcgcgagtcgcgtgggctacccgaggatgtggcgcgagtcgcgcggtaatcggcgcgagccgcgtgggagtcgcggatgtgcttttatagatagcccatagggctgagaaagaaaaggaagaaaagagagagggaagagagaaacgaccattaatggccaagagagcttcatatcttctccatatctcatctaaacacctccgacccaactgagaaagtgatcagaaccccgagaggagtgaaaacccccgattgattcttgagaaaagctgagaaatagtgagatcagatttctcagagagaaccccggagagcttgagactcagaggcgaaggaggcccagatcgagcgagtggtctgagggaaagtgattccctggtgcttctgagcatcacagaggtaagaaactcgagctctgactgttggttctgagttttggatttcggggttttggggttatcttgaggggtgtttttggaagtattagagccgttattaggctcggactctgtagagtcttatgctcagaggactgttctgaggagtttagagccttgaatcatcattattgatgatttttgattttggctctgagacagtctgagcagagataaaaggttgactatttgactagtctggaccttagagcagttgacaaagttgctcaggagaagatatagatgagtttgaccggttgaaactggtgattatgagaagttgggttttggctattgtgagcagagacatgctctatgttagctggatcagagtcttgtggagactctgtagtctttataggcggagagatgatgttgtctgatgagctgatattgtgatgtgcctgaatggtctgtgatataggtgtggttgccttgtcagggtttgacacgaggtgtcagaggagcagatcatcgttacagaggctggaagtgcaggctcggcttgccaggtaagctcatcgttctgggggttattccctatctctcgtttatcacccaagtgaggtgattgtagcatgccatgcttgtttatatgtattcatatatgattgtgcatgctgaggagataaaggccttgatggccagatattgatgattgaatagttgatggcctagtgtgtgctgggctgagatggttaaacctcaggatagacaccgagatggtgtaaggacgtgtgttacctgtggtagcaggtatggccttgggccaagatagatgaacactgtgttgtgttccaggacttgatgtggtacagatccgaataagatctgtgatggaatctataggataccgcgagggtatcaggctagacaaggttccctagccagtggtagagtttgaggactccctggaatagctgagattccatgggaggtgccactgctctccgttaaagacctaaggacgggtgatttccttaggcagagatgattgaagtcctgagatgagtgatgcctcgggcataatatgtgtagttccgagatgagtgattcctcaggcattggttttgaggttctaggagatagagtgcctccttcgtgggacggtctctcctttgtgggatgatctctctcaggtggtggtgtgacaggctgagggatgagtgcctccgtcgtgggatgatctctctcagaccttgatgagaagacctgagggatagagtgcctcctttgtgggatgatctctctcaggcagtagagctgtaagacctggaagatgagtgcctcctctgtggaatgatctctttcaggcatgtgattatatcagcgtatgagatgtatccgttatataggaatcttccagacgtggttgtacctatatatttccgaagatgcctctgatacatcctgccatgagatggtctaggatctatgcctagatgatagcctccgcaggatggtgctgataaatgatagcgtcctgccatgagatggtctagtatatattggatcctctgtgagttggatcggcgtatatacttagatgatagcctccgcaggatggtgatggtggatagtgacgtcctgccatgagatggcctagtatatattggatccgctgtgggatggatcggcatatatgtctaggtgatagcctccgcaggatgatgataggtgatagatggtgataaccgtcggaatcacatggataatgatatgtgagtaacctgattgtagtcaggtagacgcacggtgatggtgcatgagttgggaggtaacgcctctctagtatgagcagtgttcagttatgaacacttatgtgatagagtacctctgtgagagacctctgggagacggactctgagagtctataggagatgctgatgccatggttatggctttaagctatgtgagaagtatgaaagagccggtatagtatatggatgccatagtaatggcgtggctctatgagatgagttgagatggctcgagagccgatatgaggtgtaagacctctgatattactggatctggtgtgatgatccagggagagctgagatatgtgttaaagctaggttaaggtcctagatctagtatatatgagctggggtgacatcctaagctctgatgtgtgtatgtgtttatacttggggttaaaccagggaaagggaggatgtcccagatccctgagcttactgagatgtttatctcacccctgttgtgggttgtggttttcaggtgtttcctggggagaggagcaaccacatggagtaaagagtagctgagagtactggagatggtcatgggctgcagttgaagatagaagaattttattttatacctctgtcttgattttgtataagtaaagggagtgaatacacccgttgtatgtaatggttatgtttcctcctgactatctatgtatagtttttatgtatctgcctatgttttgaatgttgagtttctggatcagtagtggcttaggttgatgttttatgtgttgggtttatatttcatgcataatgatatcaagggaaacgattctatcgcttccgcaaggcgttcagataacgctgatagcgcactcatgatacttttaggataacgcaccgggtgcacacggggtgttacagtaatgaccctgattagcggattggggcgttacacgggcagcgccactggttctggtatgtggcactgatggcgtgggtatggcacggatggcgccacaggttctggaagttggcgctggaggcgtgggtgtggcgcggttggcgccacaaggtcggtggagctggcgcgggtagcgccagatgtggcgcgatcagcgcgggacctctggcagacccagtatataaagccatgtcgcgattttaggagaggaaaaccttcttcttcttcctctgagcgtcctgcagccatgggagagcttcccaagctccctttaccttgtttcttcacccaaatcacttcctaaacccatcaaacctcctagaatccaagtgagagccctaacccttcatcatttcacttaaaaccccatgagctgagaatccctttcttaagagaagttggagaactcgagtttggcgaggaacggcagcgacccacggacacccaagcctggaggagtgtcccagaggccttctttgtcgccattgaggtaagaaactcgagattccttggttgatttggtgatttagggttttgagtgaatagtgacccacttgtgatagagctagaattagctctgggtcctttagagaaacatgtttagaatgaggagaggatgcaggattagatcttagtttgtgttttggtgaatgttggttatggctctaggttgtgcatgtgtgacttggactgagtcacttgatttgagacatgcaagagccttgttgatggacttgaggtgcctgagaggccatggaaacagtgtcttgtgatatagatcgttcaagccctatggaaacccctgagttattgggttgtgagagctttaagcttattgtggatggtttgtattgagtctggaatgactctgagtccatggttgagccgagatagaccattgagggtctatggaagggcttgtgatggatgagcttgatgaaccttaagttagatgacttgagctgatggaaaggactgagattcctttctttgtggcagttgaggattgcatgatgagcttatgcatgtttatatgcttatatggtctgtgatatgcgtttgtatgccttgttagggcttgacaccgctggtgtcagtgacgcaggccatcgctcaaggagtggagctgcagagtacggctttgccaggtaagctcatcgtttctgggagtcattcccttgctcttgtttgccatccaagtgggtgatggttgtatgccatgaaattgatattgtacatgattactgatatatatatatatatatatatatgcatatgctattgagagaaatgccattgtggcttattgttgatgattatgatagttacacaccggaatggtgttaggatgtgatgatataagaatgcatggattatagacactgaagtagtgttgtgagaatgatacacctgttggcgcaggtgtgatgggccttgggccttttgatggacgaacactgtgacagtgttttgtggctatgtatgagacagagactacgatggtagtctgtgaataaggttatattagatactggagtagtatcgtgctagatgagattctctggccaacagaatatgatttatggactcccttggaatgagtgctcgggatgatgatcttccttgggaggtgccatgaagtcctgagggatgagtgccctgtatggatgatctctctcaggcagtggttgagaatcctgagggatgagtgccccttagtggatgatctctctcaggtagtggattggtagctctgaggaatgagtgccctgtatggatgatcttcctcagaccgtgattggaagccctgagggatgcgtgcccctgagtggatgatctctctaaggcagaggattgaagtcctgaaggatgaagtgccctgtgtgaatgatctccttcaggtagcggatcgaagccatgagggatgagtgccctgtatggatgatctctctcaggcattgtatggaagtcctggaggatagagtgcccctttgtggatgatcttcttcaggcatatgactggaagtcctgagggatgagtgtctcgtagtggatgatatctctcaggcagcggactgaaaagtcctgagggatgagtgcccctgtgtggatgatctctctcaggcagtgtatgtgaaagtcttgggaatgatttccctgtatggatgttcttccccaggccaggttgtatatagatatgttgtatctctaagagagggtatcccgaggggatgagaacctcttagaagagccatacctagatgtgtgaagttctgagtggttgccctcaggcattgtttatatagtttcatgaggcggtgcctctctgatatggaaagtgtccagtggttgacacttgtgtgatggtacctctgtgagatggttgagaaagctagaatgaggtgttgcacctctgatgttggaaatgtcctgtgggacgacacttttgtgttatattaccctggtagccgggtattgagagctaggatgatgtcctaggatatgagtatggttttgttatgtatgtgcttggaggtgaaccaggggaagggaggaccttccagaatcctgagtttactgagatgtttatctcacccctgttggggctgtggttttcaggtgattattatagcagagaagaatggccacagggtaggaggccttagtagagtttgctgacgtgattgagggttgcagtagaagacctgagtggaccttcttagttgatgagtggaccttcttagttgatgccggtcttagtcttccctgtgtggggaccgggtgtgtgtgtacacccattatgctgtacatattctgtagtgtaaccacatgtgtggttttgattttgatttgtatatgtatagagcttatgttgtttatgtagttgatgatgattcctcctgattatccttgtggttttctgtatatctgcctaagatgttgcgtttatgttatactggatcaacaaggacttgttttttatgatgttgtgtgatgtgtttttatattccatacataatgtaataaaaaaaatttgattctatcgcttccgcacagtatttaaataacgttttaagcgttaatatgatattatgaatgttaatacaccggaggcctacggggtgttacatgtggaaaaacatattagagagtatctctatacactttgagtcatatccaaaatttgggatttagggttcaatatcatgaatttgtgagattgcgatgtgaagagacaatttagacaagattggaatttgaagctgggaattgcaaatagggtttactcgttgatattttggctttgattagaagagatgatgaaagagttaactcattggagagcctttaactttgcattagtcaaagtcgagacttgagagacacattgaatgtgagagaatcaattgcgtgttataaaatagagattcaactataagtgaatcaaacctctttggaataagcaatttgctttaagctaaaactgcttttcaagatgtggagttttttttttttttttccaaattggtttgagtgcaaactagttgagttcaattttcattcaatttggttcaatccaaaccatttttcacacctatataaaatagggcattttagtaaactcaaattcaaaataaaaaaggtaaaattaatttttcagtcttctaattttttatttaggttcgatttggttctctaaattttaaaatgaatttaatttagtctttttgtctgaattaaactgacgatgttagaaaatgtgcatttgtgtcggtttaaaatcaccgagtgacaatattaatgcgttacaaattgtaatttcttagcaccattgatctaattttgacggtaagatcaaattgaattctttttaaaaattaaaaaaccaagttgcatcccataaaactaaaagatcaaaataaattaaagaaccaaaaatgttatttaaccttaaaaaaatatataaataacaaaagacggtatcaaagaataccatgtgggtaatccccaccatccactaatttacattaaatcaaatgatatgcacattttgacccaccaggtcaccatagttaagctgcttaactgatccaccttaaccaaattcctttaatcaatctaaacaataaatttaataaagacaaggcttcattattttttattaaccctccaatttattaaaaaaaaaatagattttgactaatcaagagtatttttattaaaaataaataatataaataatatccaaatgatttaattttattaaaaatataaataaaacctgaaaaaatatttttattaaaaattaaatataaataatatccaaatgattcaattttaatttttagacattaatcatttgaatcactttattaaagaccggctattttagaggagctctctggcatccgcaaaattagaggagcatacttatcattacacactatcctctttgaaacaaatcacaatattaaatacgccaacattttaaattaaattcttaggacaaaagtttcaaatctcaataagaactcgtccgtttgaattttgactgacacagtgacaccccattccaacagagagagaaaaacactcacccgttttcgccccacaccacagggtcccacaaaaacagtaccctccagctatacattcaaaataattcaaatttcaaaataaccctctctcataaaaaaaagaattcacagctcacatccctttcccccaccccattcaaaatccaaccgttgcaacaaaaaggcaccaacttttttctatataaaacaacccttctcaccatttcttacgccactcaaacccaaaaaaacccctttgttactctctcttccaaaacctatttttcatattttctcctcaaacaaattttcaaaatgcgtgagatccttcacatccagggtggccaatgcggcaaccagatcggcgccaagttctgggaggtggtttgcgcggagcacgggatcgaccccaccggaaggtacggtggggactcagagcttcagctcgagaggatcaatgtctactacaacgaagccagctgcggccggttcgtgccgcgcgcggttctcatggacctcgaaccgggcaccatggacagcgtccggtccgggccgtacgggcagatcttcaggcccgacaactttgtgttcgggcagtccggggcaggaaacaactgggccaaggggcactacactgagggtgctgaactcattgattctgttctcgatgttgtgcgcaaggaggctgagaactgcgattgcttgcaaggtatgggggttttggtgtaaaggttgaggctttttagggttttgtgggtgggtttgaattgggggtttgtgggtttgattcaaagatggaggagatttggtttgatgggtgtgtttttagggtttagtgggggtttatgtttttgaatttagggtgtgagggtggtggttttggatcgggtctgtgtggatttgttgggaaagtgaaagatggagggtttttgtgggtggttccttttattaaaggtggaagctttttagggttttgtgggtggttttgaatcgggtgtgggggagtgtgtttttaggggttttgttggtgattttgggtttgcatgtgcttttctgtaagatttacagccttggatgtgttatgtggccgattttgaaacgtatctttataggcggattttgatttgtgggtgatattgaaatctgaaccgagacttttgtgttgttgtttactttggaaatgtaggtgtttagtttgcctgaagggttctgtggttgatttttgagacgagatgtttatgtttgattttggaaatggaggtaagggctttgaggttgatttctgtgacgagaagtttgtgttgtggttgatttttgaaatggaggtgtttattttgagggtttattgggtgtatgtgaattaggtgtttgttctgtggttgattttgagatgattcttcgtcttgcaggtttccaagtgtgccattccctgggaggaggaactggatcgggaatgggtaccttgttgatttctaagatcagggaggagtacccagataggatgatgcttactttctctgtttttccatctccaaaggtttcagacactgttgtggaaccctacaatgctactctctctgttcaccagcttgttgaaaacgcagacgagtgcatggtgcttgacaatgaagctttgtatgacatttgcttccgtaccctcaagctaaccaccccaagctgtaagcttttacaaatgtcatttaaccccttttcaatttaagacttctcaattttgttcagtaagattattcattgaggataatattgactgttttatttttgtgtgcagttggtgacttgaaccatttgatatctgcaacaatgtccggtgtcacttgttgtttgaggttccctggtcaacttaactctgatctgcgaaagcttgcagtgaacctcattcccttccctcgcctccacttcttcatggttggatttgctcctttaacatctcgtggctctcagcaatacagggccttgagtgttccagagctcacacagcagatgtgggattcgaagaacatgatgtgtgctgctgaccctcgacacggccgctacctcactgcctcagccatgtttagaggcaagatgagcaccaaggaagttgacgaacaaatgatcaatgtgcagaacaagaactcctcctactttgttgagtggattcctaacaacgtgaaatccacagtctgtgacattcccccaactggcttgaagatggcttcaacattcattggtaactctacctccattcaggaaatgttccgtagagtaagtgagcaattcactgctatgtttaggaggaaggctttcttgcattggtataccggggaaggcatggatgagatggagttcacagaggctgagagcaacatgaacgatctcgtggctgagtatcagcagtaccaggatgccactgccgatgaggatgagtatgaagaggaagaggaggaggaggaatatgctcaacatgatatgtgaatttgaacttggtggtggtgtattgcggtggtgtctaaacgaagatggataacaagccgcaacttcctgttgccggttgatgattgtctcttttgaggggatggttttgttccggctagatctagtttctattactgttctataaaactgattctggtttgtttccgtttatatgtaacctgttggtagggaagataatataaaactctgctatgatttaaagccctaaatgtttgctccatctaaatatttgctcgatgattagtgtgttctttttaacgccttgctctctatatgcatatcctgaaaaagaaatttattcaaccaaatcaatctcaacgtaaggtggtggtacaaattagtttctgttggaaatgatgactaacttttatttgagattggaagtgactaacttcttttaatttaatttattccatattatttggtgtggtgggttcttttagtttgaagtgaaagaataattcaaccaacttgtaggataaatagcaagttggagcgttaaacaaagtctttgtcaagtcaattttaatagaaaaaggctcgcccgtaattgagataacttcataactcgtcataactagccgtcaaaatttgtccgggagtgaaatttaaattttatggtagaaaaagcttgcgtgtaattgaatttcctgacagcaatgaaatgacttttcaactaagcaccaagacaagactttggtgcacaagatgatgccattttttaaaattcaaatttaggcaaatacataatttgtcgtttaaaggatattcgagattcttaaaatacagttccacaacgctcttggtagcatgtaggcaattactgtatactgataacagatttaaagattaagacgtgggctacataatggatcaaaggaatagagctggggggattcaacacaaacaatttatgtatggaagagaaaatatttggaggggatcaaaattccagagtttacaattttctcttggatacggacaacgacggaaaaaccagataaataaatgtgacacatttcttttaaagatattcaattttcttaaaatacagtaatacaaggctttttttttttgtagcttttatatgtaatagaaggggcaatatttaggggagtatttagaggggtcgtatttccataaacttcacaattttctcttgaatggaaaggaaccataagtcgtaagtaaccaattcattagtatgggttgatagtggttatcttcatacaattaaatgtatgcaacaacatatagtacattaataagtaataaccccaatttgggcatgtttcaaaaaagcaagcaatgtttaacacagttggatctcaatctcaatttgataaacaatagacaacgtcaggaaaaccgagtacatagccctttaccaagactacaactattacaatagagcaaaacctaaatacaagacaaactaaataaatttacaaacacgagctacctccaacctcttcttccctcatgaggttcttctacttcttaccatcttcgatggttttatctacaacaattttgacttttttcctatactcaacatctacaggttccacaacagactcctctggcaccactgcacgtttattgttgccaaagatggtccacaagtaaagcacaataaatgctgtcaaagctccacatccagtaccaaatatcattgcagcaagaactctcaaaaagcaatcactcctttgtttaaccactggactttcagtgtttttgacaaagacctttggatccagaggctctgaatgcattgaatgtggaaaatttctcagaacaaagctccatgaatagagaaagcatgcttgagaatcattattcccctttacagaactaaaccccacaaacatttcattctccttcaacacatttgacaagtcaattgaatgccacaacaatggataagatggccttgctttaccatgctgactcaatctcacttctaagcgtctcgaactagcttcatagtcaatccaaacatgcaacttttctccaatagagttgttactttttttagcaacaacagaactaccaatattcatgttcacatcacaactagaagaaaccccttttctaccaccctttgaggcactgaactcaacaacaacagcttcaaattttcctccattcaacccagaagaagaactttgataaaacacatcaccttgagaaccctttggagccataacaaaagccaagccacccccatcttccaaggacactgaaaatgcaaagtaagtagaaaaagacactaattgccttggtttaccttgaaaaagcttaatgggcttcttgtacatgattctcccagtgcctcctgaactcccaaagccagagaaatgaatcccagacccttcattgagaacctttgcattaccaaaaagggccacgttgggcttaaatttcagatcttttccaaagccagcataggaaaacagaggaattgggtcaaaagctagggttttgaggaacaaaatggagaaagtgaaggccctgaagtaatgggaagtgggaaatgatgccataattgaagtggggttggtttggtttgagattgaatgaatgaatgaatcttgctggtatgtgaccctagggttggtgggttgatcgcatttgcatcaaaaggtagaaccttattgatttttagaggggatagggaagaaagcagaagaagaaagaaagtaaagaaatattggggaagttgggttggaggttgtgaaaatttaatacgttttacttgattctgcagcttggtggttcactttttctcagtgccagatgaccaagggaatataaaaaaaaaagcaatttttgtaaccaaaaaaatgaaaaaaataaaagcaatctttttttttttttttttttttccttttgcagtttgagtctttccttttgcaatattcttcatgtgaaatcacaaccttagataaattcacaaataactggtttaacttttaagtcgtatttgattttttaaattctaggttcattgtggaccactccattaattgtgaatgtgcttttaatttttgatcttgtggtgttaggtcgtagaagactagagggagattccttgttctagctggctaatataaccgtatatgaatctcccttaaagtgcttaaatttgctgttttgtggatcttattatagcatgttatttcttattttacattactttaataatttttattttttcttaccctataaaagatatttttagctgtgcaattataaaagatttactaaatggatccgataaattatattacattttcaacaattaacaatatcagcctttcaatagtagaaatatttaataattctaaatttacaattagtttgtataattttgaaaataacaaagggagaactaatattttttttttataaaaaaaactgagacaagataattgatgtgatggagagtaacagaaagaaagtgatttctcaccaataacttggttgaatgatacaagtataattgtgattgtttacaaattagtgctttaataaaatagtcatttgttaaatgttttacgagaaatttgttagtgagagtgtgatggtctaagaaatcctaaatagcacagtcatggggattaaaaaaacaacaaaacgagtgaaaggcagcaaaattgaagcaaacagggcatgttatggtataatgagagcaaattaatgcattgctcaaatgttctgtataaaagttgcaaaatgtagacgaagtttgcttggctattaggcttgcctcaaacaaaaatttatgggttactcggtgaaaaagtatgaactatgaagtagaattctagtattttagaagggaatagtgaaaaacaagagaaaaaatgaacaatgtccaatgaaggaatggagatgtcattagtttagtcttaattaccattttttgtaatctaatcttaattattaagatgatgattgtatggataaacttaattataatattttctttttgttattatgtgttggattgtctaaagtattggatcatgacgagatgtataatatttgtatgtttggatcaagtcatttaggagtgtattcactcattcaaatatttagacatttttcaataatacaatcttgagattaaagttttgtttgggtgattggttatgtgattagcaaaatatctttctggtatatctaattatttaaattacatcactaataaagtatatatccacacttttaaggattttattttctcacttcatattattacgagcttgttattatcaaaatgtaaatgtaacaaattggaagcaattattatttggattttttttttgtgaatttggatattcctcattcgatagtgaatgactaatttttcgagatacttatatttatttataagactaatctttccaacaagtatttttccatctgacgagaaatcaaacctctaataacatgctttaagggactatgctatttgcaaccatatcactctactccctctgtcatatttaagaaaaaaaatgacacactgattaagaaaagaaagttagttaattatatttaattacatcaattttaattaaaaaagtaatatttttttctaatttatctttcattagaacttaatatcaaatataagagagttgttgaaattaatatctcagttaaggatattttaaaaataatagtattaaataaaataaattaaaatttcttatatttacaattagaaaatatgtatctttccttatattatacgagagaagatgttggtatttatttggaaatattaaaaagttgtgacttgtgagaggttggcaaatgccaaactcaagcaaaacattttgtaaattgctttcattttgtctaaaggggctcatattcatatgtattttttcttgtttactccacctccacgcgacaccagacactttctccttttgcattagaatagaagaaagtgggtggtggtgaattgtgcttgtgcgtcttgtccactttggcatgggagaacaacgaagctcacacttcgaactaatattgttcttttaactcaacaaagaattatgttagttactgtgacattttcattcacctacaccttgtcgtgcttcaagtgtttggtgtatggattttttttattcctcaacaaaatggcatctacaaatttattcgtatgattaatcatgcatggtttttttcatataattatttggtgtagaggttagttggcgcgtgaacaaattgcagatactatttaattataagtatgttgtaacatttgaactgccgcgttcacatgcacagataagcaaaatgtacttaacatgtgaaatgttgaaaaagtcttgtgtttatatatttagtgaataatttcgtttaatgttaattgattataagttgaaatgtaatataatattaaatttatattacatcttagtttttgcttattaattaattttaagctgaaatttaagatgaaagataaaaagtaaattcattttaattattttttattattatatcagttatgtgttattgtatatatgtattattaaatggttttataatgtaaagagttttataatatcatctaattatagattgacatatataataagtttattaatttttataatggacatcttaaaaattacatttatcacaattttaatttttttattaattataatttctaattaattgacagataaaagaattgtatattcttttgtacaataaaagttttgtatattaacaatgcttagaaattaaacattaataagtgacacacgctcattggttgtgagggttaatttatttgccaaaaactacaatatttctggtagtttattgagacaaccacgcataaacagccagaacgatactttttttaagtgatatatgaatatacgattatgcaaaaaattgtacaccagtgaaaaatttagattaaactttttaaaactacatgtaagggttaatattaaaaacattaaacttatttccaatgctcattcattcaaaaagagtaaagatatttcttgactctgttttctccttgtcttcaagtgtttctcgtttggtcccaaccgatcagggtattgctcttgacacatgtttgcgtcgaatgtcaaatgaaagcatatatgtgtttgacgtagggccaggactttgtgtgttgcagcattattgtcaattattatatttaaataatcatattatagcataccaattaatttgaattgcaatttaatcggaattggtgagattggtgaatgttggaagcctacctagctagtcttcttataacattcaatatgttcccttggtagaggaaaaaaacactatcatttatttgcatgatttttttgttgattgttctctccttctctctctgtactagtatctttcaaatttttaattaagaaatgttacgtgtgttacttttttaaagctagaacctaattaagaatacaaatactttgtttaaacaaagcaagatttaaaactacttgattatgttttttctgtctgtttaaaagtcaattttaaatgttatttgtgctcattaatgttatctaggtgtattagaagttaatgatattggttcaatgtcatgtcatattggttagcatgtttatgcaagtgatatttatggctgacctaagttagtgacttagtgtccacgttgaacagttttacatatttctcaatcaaatagtttctttctttactttctttgtacacaaaaaatagcaagaaaaagaagttagaataaaacgaagatcatgcttttgctgggggcataattaattaacagactagggagaatattaagaatcaaaatttcacatctcatgatgaattgacatccttaagaatttaaggaatctggattaaaaatgccacgaatacaaataaataaataaatagtattagatcaccatcaatgatgatttgaatgataaaggttcactctcacatacatagctcatgtggtttgaccaagaatgattaaggattcaagagaaattaagtctttcgtgtgtcaagacaccaaatactattttatattttttttatacatatattaaagttggccatatgatttaaaatcgtatgaaatgttcttaattggcaaagcaaaatacctttagattctacactttctaggagagtttattttattttattttttccatacttttctacgtcacaccctgtaacttaattttcatgctggacgaaaaacaaagaaaatgtaatgccagatagtaatatcatgagcatcaatttcctctaaccagtcaaattgttcatctttggtgatcaatgtttcttttaagtttcactcagttttagatttcaattgtttcaatatgccaaaattttcacaaactctcagaaatgaggttaagataatttataagtatattttccttttttatttttattttataatatgaacacatttttttcttaatctatcaaggccttttttagtaaatataaaattataaagtccatcatgcactaaatcagattattttttaatgaggtaattctaatgatgtatgaaaatttgagatcgaagcattaatcaaatgctcaatttatgtatgatgaaattcaaaagctagtaacttgagttattatgttgaaaaactttaaggtatatgattttgtgtgagtatttgaaatttattttgtaaaatttattttaattagaattaattttaaagtaatgtaattttgtatttgaatgtttttcttttaaaaataggttaataataaaacttagtattaaaatatttatcaacatatataaaaattatttaaaatttcttcaactcaaagttaactacagactcaaaatcaattccagaatataaaataaaacatctgaacagtatcgagggtgacattagtcggtttttcaacatgattttgaatgttccactgtgaattcaatcacgtacttaaattcccgaagactatactatgagacatgtggaaatgcatccattaattggagaagataaaatggaaaatttattttatatatatatatatatgtatattataaattagaatattttgaaaagtgaaattctcactctctcaattagatatttttaatatatttttaaaaaatgcattttatacactattcctgcaattggctaaaaattctctattaactatctcaaattattttcttttttattttatttatatacttatcttcttaaccacatagtccatataatctatcctcttttgtctttatttttaaattaaatttcaatagattcttttaaagaattaccaataattcaaaaaaaatttaacttatgtaaaaaaattatatcacaaattgatccattggacataaatccaatttttcattttttttctttttcattttttcttcattataatataaaatataatttatatatatttaaaattatttatttatctattttaaagtttaattataatataacttaaatattacaattatttatttattataaaatttaattatatatataaaataaaacaactatcctatgtaatgtatatgttagagtattagttacaatagaaattgataaccagttgaagtggaattatttggaaaatacgaaaaataggataacatcctcctcaaaagttggaacttggaagtggaaactatacaatgtagacccaaaaaataaaataaaaaactaaaaaatgaaataatcttcctatcttctctgtcttctggtctgataagtttcaattcgaacgttggagaatgctgcatggtttcccctttggactttgtgtcctctcttatccttctatcatctttttgtggccttgtctctgcaaacagtgaaaaaaatgtgtgatttcaaaaggttgaagggtcacaagtgccacacactggttggtgaagagagtaggcccatctgtcccttttttctttccgttatttcgctttcgcagtgcttttttgctttgtgtttcatcttctgcaataaaatgtttgttacctggcaacatcgtattctagagtccaaaggctaagcatgtatttaggtaaatacttttttgtgttttactgttagcgatacattttttcgtcaaatatataactaagttacacggggcaatattgttcaatcgtagagtttaggtagattccatgggatgaattaaattgtaaaaccgtaaatacgtaaatcatatataaaaatttatttcatataaaaaaataaaaataaattgaatatccaacattggcacttgcaacaggtgaagttatatttaattcttcaacaaacaaaattctgaaaacaacacacaaacactcaatcagcaacaattcgataattcgacagaacacactaccaaacacacagaacactcaacacacaatagcaaacacaaacacacagggaggaaccgagggagaaaaatcaacacagggaggaaccgagggaaaaaacacacaacacagaacactcgatctcaacataggaaggagccgaggaagaaaattcaaacaacaatctcaagctcaagagtctcaatctcaacaatctgaataatcaaaacaatctcaacaatcaataataacaattcaaaacagagagggactgagggagaagtcaagaagcaactagcaaacacacacaggaagggactgagggagaagaccggagatggagcacttacctttgggcgcgggcacgagaggcagaagatcggagatggagaagactggagataaagcgcgacgagagggagaagatcggagatggcgcgacgagagggagaagaccggagatgtcgccaaccggagatggagcgcgacaagagggagaagactgaagatggtgcgcgtgagacattcgtaagagaatgggttttgaaaaacctatttttttttttaaatacacactgagtcaattcgatgattcaactgagtttaccgagtttatacccatatccgagttcactaccaagttggctcaatttagggatagaaacgttgacttgaacgagtttattgagtcaactcgtcaatttaacaacattcacacgaggaacaattattcacatacttcatattactttttaaatgtatgattaaaaaataactttaaactcttcaatatctttatttttatttttctttaaaaaattaaatttgatgagacccaagtattatcacatatttcgatcctctggattgattgtgatattaattctaaatttgaaacttaatcatatttaatattttttttgtgtatagtcctacttaatgatttaaaattctctatcttttttaaaaaattactctatgagaattgagtgaagtttcctcccataaattcaacatatgttgtaagttaagttatataattttgaatcaacatctctagtttgaattcacaaaaaaaaaactctaatttgtttgaacatatgcaaaacctgtctttttcatgagaaaaaaaaaataatagttgttattcaatgtctttgagaattggtccaccaatcaatcctacctattgagtgaatatttgcaaaattaatttcaaacaaaattgtatttttaaaattaattgattaaaactcattttaaaataagattatttatatttggatgttgtttttaaaaagtaaaattaagcgttttttttcagtcactaacaataggggtatatacggttcaaactcaatccacaaatctagtcaatataattagatttttgtgagttgaattgagttatttgatttgattgattttagtttaattaatccaattaaaataggattgagtgataggtttggatttttggttctaatcaaaatccaatcgaatccatatacaattaaattattaataaaaatcctaaattaaacacatctcattcttaatgtaatatattattttagagtttatcttttttattttattttaagataatgcattttttatgaatggtggtgtaatatatatttatgatttttttatatttatcatatgaatagtataatgtttaatgaatattaatttttaagaagactctcactattatgtaaaaaaaatatatctttattatttttgaatttaagaatttctttaattttttttcaatacttaaagaagtgataattttttaatgactcaacttgataaccaatccaatctagttcaattaaagttagattgaattggaatagattgaaaaaaataaaagagataaattcattccaattcaactcaattaaatttgatttaattaaactaaaaaaatagacaaaactttaactctaaccgcttacaccttaattagcacaataaaatattccccaaccattacctatctgcacctccacaggatctaaacatccaccaaattatccagagaattatcattgcattataattgattcacattcatatgtgttgcggattcgacaagtataccgatcgttccaagtaatataatgataagaaaagatatcgttcccacgaggattgtttgaccaattaaattataaattgtatccataggttggaggacaattaattttgggaaattggtgttgtatgtgtgtaacagattaaattaaaatctaattataaacataaagtattgtaaacaagcaattaaagattgtaccaatacgtgaactaatgtagctagggcaacccgcactcaatgctcccaacattcttacatggattgtttactacattcatctattccagttactcaattcatgcatcttctttcaataattgttaagccctactcccgtagtgacattaatcctttaacccatgtaaataccctaattccttagtagcatctattaggttaagcattaaatgatgcattaaatgtttgcaagcatacacttctatccctagacaatgtaaagcttgtcactttacccaagtccaagcatagaatctcaatattcctattgcaaaccctagctttcagtacccaactagattgatcagttccggcaagatataaacatacattcaaacaaagtaaagtgaaataacttggcataaatgaatgataacattcaatccaatccaaatgaaagttacattgtgatcgaggtcgtactcaatcaaattattacagtttaaatgtagtactagaaagtgactcctaggtcgtctctcaaggatcaattgtctgcgtaaccgaaacgcgaattgaaacaaaacgtaacataacgaaaatctaaatactgcaaacgaacagaacacaactgaaacgaaataaacagagaacgaaattgaaagcagaaaatgaattcaaaattgagatttgaaacagaaatgaaatagttactggaattgcaaattcgaacaaaacgaaaccctaaagcatagtcaccagcagaaaacgaaaacctaaaaacagagaaaacgaaaacctaaaaatagagaagcagaaaacaaaattctaaaaacagagaagcagaaaacgaaaatactctaaaccctaaaactgagcgtaaattagtgtgttggctggtgcctctgcatgggcacaatattcgaaatatatagagtgactgacctaaacgaaaatgggcttttcctaacagttttggcccaaaaaacgaaaataaaataaaaagaaaataaaatgctgatgccacatcccaatcttcaagtccatgcattaattccaagcccatttaattattaatctgtcctgaaaataaaaattggaataattaaacttaaaataatccacattaattaaaatctgaattatcggtccaattaaatcctaaatgagaaacagtgcagaatatgaacatttaaacacaaattagggattaaaatgagtacagaaagatgagaaaataaaggtaaatagtgactcatcaaaacccctcacacttagccttttgcactcctgggcaaaatccaaaaatggagcaaggaacaattctaaagactttaaagaaagtgacacaccataaaataaacagttctgcacaatcctcaatgaaaactgggaaaagagaaaggaattgacaatttccaacacacaaagagtcagagaaactacacacttatgagatttatccaagcattcaaaacttatcaaaacaatcaatccgctcaagaggtgaattaaaagcaacagaacctcaccagatgcactgtatcacactgtatctctcaagtgtttaggcaattgtatactctcaaaacactcatgaaaacaagcaacatatagacttggcaagtctctataatcaacacccaataaacatgcacataaggatcaaaaggtcttttcagggttgtaatgtggtcaaggacatgggagaggataaaatatgggataagtagctgcaaaccagagggactggaggagcaatggggaataagtaagaagtaagcacaaaaacaaacccaaaaatctctaatcaacctttaacaccattccttttcctttgcttcaaatacaacagcttttcttcaatttattattttcttttcatttctatatttttttttctctctctcttttttttttgaaagcacatgaaatatggtactgatataacatgatgcatagaacatgaagaataagctaaacatcagagtaaaccaacaggccagagacatcatccaaaacaatatatacatgcacccccctcacttattcccaaaacaattccaaagctccaaagttccctaaggttaaggtaatcattgtttttcacttaaggcttgtaatgagtttcaaacaataggaaggaaattaggctcaacagggttgtcaaaggaattaaattcagggtaagcttatttggccagaggcttatcaaacagagtcaagacaaggcaattgtgcaagcaatcaagaggtatagcacacatgaaagaacagatagttcaaatcctcacacagggtatatctgtcacaattaaatcaacctttcaaacttcataatcatctttccaagtagagaaaaacatggattccaacccatacagtatgaagcaactcttatctaagcgtgaagtaggtgtcaacacttattcaaaacctagaaatcaaaaagaaatatgcaaaactatacgcaagataacaaaacaaacaaaacaaaacagcaaaaacaaaacaaaaagaaacagtctctccccccccccccacacttaaaattacacattgtccccaatgtggcacaacaaaagttcagatggacaagtgcgataaaaataaaggaggagaaagaaaaagaaaactccctaaggtgtagtggaagatggaagggagtcagggtcaagcagagatatctcctccacaactgcatccagcaaggaaggattgctgaggaatggtttaagacggtgtccattgatcttgaagctcttgcctgtggactcacttttgatttcaactgtaccataaggataaacattagtaacaacaaagggtccaatccactttgaccataacttaccacgcatgagtccgagcctagaattgtacaagagaactttctggccaacctcgaagtctttcttagctatcaggctatcatggaacttcttggtcttctccttgtagaactttgagttctcataagcttcaaggcggatctcatctagttcacttagttgcaacttcctttcctcaccagcttgatccatggaaaagttgcaggtcttcacagcccaataggctcgatgctcaatctcaacaggcagatgacatgccttaccaaagacaactcgataaggagacattcctatgggtgctttgtaggaagtcctatgagcccaaagagcatcgtccaatcttatactataatcctttctgttgggctggacaactttctctaagatcctcttgatttctcggtttgaaatttcagcttgcccattagtttggggatggtatggtgtagagattcgatgcacaaccccatattttttgagcaaagcctgcatggatctattgcaaaaatgggttccttgatcactaatgatggctctgggtattccaaacctgcaaaatatgttagatcgaacaaaatctaccacaactcgagcgtcattagtcctagtagctctggcttctacccattttgaaacataatcaacagctaaaagaatatatgaaaaaccaaaagagacaggaaaggggctcatgaaatcaataccccagacatcaaacacctcacataatagcatgggttgttgaggcatttgttgtctccatgtaagggatcctcctgctctctgacactgctcacaagtgctacaggtcttcgccgcatctctgaagatggtaggccagtataaaccacaatcaagaaccttgcgagctgtcctctgtatatcgagatggccacctggtgctgaggaatgacagaactgcaagaccgaattaatctcatgatcgggtatgcatcttctaatcacctggtcattgcataacttccacaaataggggtcatcccaaatataatgcttagcatcactctttaatttatcaatttgagctcgtgatgctaagggaggaaaaacagaagcaactagataattcacaatattagcaaaccaggggatgggattagaaacagaaacagaagaaacacttaaaagattttcatcaagaaaattatcctggatgggtaacacctcatcattattctcagctccttcaattctgctgagatggtctgctaccaaattctgagctccactccgatcacggatatccaaatcaaattcttggagcaagagcatccatctgatcagtctaggctttgagtcagtctttttcaacaggtactttagaactgcatggttagtataaacaataacaggagaaccaagcaaatatgatctaaatttatcaagagcaaacacaatggcaagaagctctttctcggttgtagtgtagtttgcttgggcagcatccaaagtcctggaagcataatatatcaccctaggcagcttatcaactctctgtgctaggacaactcctaatgcataattggatgcatcacacatcaattcatacgggactgtccagtcaggtgcctagaggataggagtagtggtcaatgcttccacatctttttgcagcagattggatagcggaagagccttcttgctgaaatctttgataaagcgcttgtagaaccctgcatggccaaggaaagaacgaacctctcgctcgcaagaggggtaaggcagatgtgaaataacagatacctttgcaggatctacctctatgcccttactagaaatgacatgccctaaaactatcccctgttctaccatgaaatgacatttttcaaaattcaagacaaggttagtttcaatgcatctattaagcactttatccagactatctaaacacatgtcaaaagaagatccatatacagtaaaatcgtccataaacacctctatgcaattttcaagaaaatcagagaatatgctaagcatgcaccgctggaaggtaccaggggcgttacataggccaaaaggcatcctcctataggcaaaagtgccaaagggttaggtgaatgtggttttctcctgatcctcaggagcaatatggatttgaaaatagccagaaaaaccatcaaggaaacagtagtgagatttacctgccagacgctcaagcatcgggtcaatgaatggcagcggaaaatgatctttccgtgttgcttgattcagccttcgatagtcgatgcagactctccaactgttttgtactctggttgggataagctcatccctgtcattctttaccacagtgaggcctgtcttctttggaaccacctggactggactcacccactgactgtcagagataggataaatgatcccagcttgaagaagcttggtcacctccttcttcactacatccagaatcaccgggttgagtctcctctgtggctgtctcacgggtttagctccatcttccaatgatattctatgcatgcaagtggatgggctaataccagatatatctgccagggtccagccgatggctttcttatgctttttcaggacttgcaacagcttgtcctcttgaacaacatcaagggaagtggaaatgatcactggcaacttctcatcactctccaagtaggcatacttgaggtttttcggtaaaggttttaattctggaatgggagtaggctgatcagaggaaggaaccagggatggaagaagaatgggttccacagcttgtaccttaacctgcaagtcagattcttgtgtgcttcctgaaacatggttagtgtattctgactctaaaaagttattgtccagaggtacatcacccaatacatcagaattaatttcagaacaggcatcaagatgggacacatgttcagattgaaaatcaaagctagaatcattgtcagattcatattcagattccatgcatgcaagagaagtgtaaaggtcagatagaaaacattgttttgtagcatgggaagaatataaatcagaaacatactcatcaacaacattatcaataatctcagcacggaaaacagaatgattttcagatggatgtttcatggcatcaagaatattaaaatggacaacaatatcaccaaattccatagacaatgtaccagcatacacatcaatcttagttcaggctgttttcataaatggcctgcctaaaatgagtggaacagaaccatgggagaatccctcctccatatcaagcacatagaaatcagcaggaaaaatcagttcaccaaccctaactaagacatcctcaatgaaacctgtagggtaggcaacacttctatttgccaattgtatgaccacactcgtaggttgcaaaggaccaagagacatagatttaaaattagaaagaggcataacatttatagaggcacctaaatcaagcatggctttgtcaaatttattgttaccaataacacagggtatgcagaaagtacgtggatcctcacatttttcaggcatgtttggaacagtattacctgtcatagaagacacatttctgcccatgctgactctctcaattcccgtcatcttcctcttcctcttattagtgcacagctcttttaagaattttgcatacttcagaatgtgctttatggcatcgagcagaggtatgttgacctctactttcttgaagatctccaatatttccttatccacctcttccatctttttgtttggaatcgatctaggaggaaatggaagagggatggaatgctgctgctgcacatcagaactggtgctagaagattcacctgcatgaattttttgggtaccaattggatcgtcattttgctcatgtattggtacaggtgcaggggtaggaactggtacagatggaggtgggggcattgcagtaggtatgtcaatctgttttcccgacctcaatgtgatgacactcacatttttcggattctgcacagcttgagaaggtagtctatctaaattttgtgactgtgcctgattaagttgagtggccatctgccccatctggttagtcagactctggatggaagctctggtctcttgctggaattgcaaattttgaagagtcatctgtctcacaagctcctccagtgaaggttcagaagtagaaggttgaggggatggtggtgcaggtgcatcctgctgttgcctctggtactgctgctggactggtggaggcacatatggtctggttggaccagcagaaccttgaaatggtggtggtggaggctgctgctgatgctgttggagggtgtttgaccatctgagatttggatgatttctccatcctggattatatctgttactggacagatcataattcggctgctgttgttgaggcctattattgtagatgtttgcagcataagcttgaggagcatcagggccaacatgttgctgcagagagggacatgcatcagtatagtgatcattggaagtgcagacaccacaaactctggcaacagaggcagacttttggttaacagcaagttgagtgactaaattaaccaaaacatctagtttgccctctaattttgttgctgcagatgaagaagaattaacagctacatcattaactccacaaatcacaatggcatcattccttgcactgaactgttgggagttagaagccatcttttctatcaaatgcctagcttctgcaggggtcatatcaccaagtgttccaccactagcagcatcaatcatactcctctccatgctgttaaggccttcataaaaatactggagaaggagctgctcactaatctgatggtgtggacagcttgcacacaactttttaaatatctcccagtactcatacaagatttctccaccaagctgcctgattccagaaatatccttcctgatggcagtggtcctagatgcagggaaaatttctccaaaaacattttcttaaggtcatcccaacaagtgatggacctgggagcaaggtaatacagccagtcctttgccactccctccaatgagtgtgggaatgcctttaagaaaaaatgtgatcttcagggacatctagaggtttcattgtggaacagactatatggaattccttcagatgcttatgtggacattctcctgcataaccatgaaacttaggcagcaaatgtattagtccagttttgagaacatatgggacatcctcatcaggatactgaatgcacaagctttcataggtaaaatcaggtgcagccagctccctaagagtcctctcacgaggtggaggttgagccatattattctcagtattagtataatcagcagaatcagaaatagtatgcacagaatgctcagaaggagaatactcagaatttaagctaacactatctaatgaaaattgcctagaatgcctaactaatctatggtaggtcctatctatctcaggatcaaagggttgaaagtctcctggattgcctctagtcatgcactatatgcaacataacaagcatttggcagacaagcacaaagaagagaggtaaaactagaggtatactcaaacgaagtccaaatgaactgaatttttgtgagcaacaccctaaaatcatgaaaagacagcacaccaaaattcgaaacctaattcaaaggttaactaaataaaacagattaagaaaatttagaaaaataggaaaataaaacttcaaaaataaaaataaaatagaaaacggcctctttttgaaaatccaacggtggccaacaagcatagcatgctgggttggctagatcttttttttctaccctaaaagcatatataatatgtccaattctgacggtcggatcaaaagttatgacagtttgaagttttcacaaaaatttgaatccaaaatttttgcccctcagaatctggaatactttaggtgctttcggtatttttccacacaaatatatgctaaaagaagttaccacacaaaaattgaagcaaaaataacaactctagctatcaaaactaaaaatcacaattaattcagaaaaattgttactgttcatgtcactattcatgcttgtcgcgcctctctgattccgcggattgcttgttgattgcactaattgacctgcagaattgatcaacacaaccaaatatgcaagaatcaaaaggctcgaagcacaaattataacaagcacacccttaaaacagaattggtataggaactgatataggaaataggctaccaattcgagttactgttccattggttatctgagtgaaatttttcagcttactcgaatgctatcttacttcctctaccaattgcaacaatgaacaataaagcagaacagaaaacagaacaacacacaaaacaaaataaaaaaaaacacacacacagaacaaacacacacacacacacagtagaaccctaattgcagaactgatgatccccggcaacagcgccaaaatttgattgaggtcgtactcaatcaaattattacaatttaaatgtagtactaggaagtgactcctaggtcgtctctcaaggatcaattgtctgcgttagggattgaaaacgtgtattgggggggtttttggcagaatacaagaatctaatttaaaacagaaataacaattaactgcagggatttaaaacaagtcagaccttagaacagattgcgcctctaatatccttggttcacgaaagataatctgttctacttaatccttatcagtccagattaatcaactaagcgaagattaacctaaaacttcattacacgaattaagcaaatgtgaacctcgtcagggcaagctctcaggattaagcaacctgagattactgaatcaatcaatatcagaatcattaagcatgactctaattcgaaaaatacagaacagaaaccccaataaggaagaatcaaacagaaaacgaattgaaattacagagaacctccattaaagggttgcaatctgtcctagggtccaaccctaggatttagccttccattaattcgaaaataacaaccgaaacgcgaattgaaacaaaacgtaacataacgaaaatctaaatactgcaaacgaacagaacacaactgaaacgaaattgaaagcagaaaacgaattcgaaattgagatttgaaacagaaacgaaatagttactggaattgcaaattcgaacaaaacgaaaccctaaagcatagtcaccagcagaaaacgaaaacctaaaaacagagaaaacgaaaacctaaaaatagagaagcagaaaacgaaattctaaaaacagagaagcagaaaacgaaaatactctaaaccctaaaactgagcgtaaattagtgtgttggctggtgcctctgcatgggcacaatattcgaaatatatagagtgactgacctaaacgaaaatgggcttttcctaacagttttggcccaaaaaatgaaaataaaataaaacgaaaataaaatgctgatgccacatcccaatcttcaagtccatgcattaatttcaagcccatttaattattaatctgccctgaaaataaaaattggaataattaaacttaaaataatccacattaattaaaatctgaattatcggtccaattaaatcctaaatgagaaacagtgcagaatatgaacatttaaacacaaattagggattaaaatgagtacagaaagatgagaaaataaaggtaaatagtgactcatcacattgagtgtttgaccctaactacaaaaagaaactagccaaacctagtcatggatggccttgatacaacaaaaagaagcatgctctgctgatatgcaagcaaggagaggaatagaagagtgaagaacccactttcaatcacaccccaagccctagaatcagctcccaagctttcttttctcttcctttggtgattttttgtccaaaaagcccctaaaccagaagtgggatatgctctttatacttggggaagtgaaatcccaagtttggcccttgacagcttcattaatctgcagaatcaaggtttggcgcggatcgtgtgaatcatggcgctaatagcgtcagctttttaactgtggcgttgatcgcgtggggcatagccctgatcgcgccagcttcaatcagcaattaatttcttgctctcgcgcggctcgcgctggatttggcgcggatcacgccaaaaaccagagggattgcactttccagagtagcatccacgcggatcacgtgggtcttcaagcggatagcgccaaatgatgattatggtgctgatggcactgcacatggcacagatcgcgccaaaaaccaggggagaggccatttccagggcagttaccacgctgatagcgcggatcttcacgcggatgcgccacttgatcccaactggcgctaatcgcgcaagaggtggcgcggatagtgccaaagcttccctacttcttccctgcatctcttttaattaaaatcacctgctaatcctttcaattaacaaaaatatatcattgaggcaaatttgttacattcataccaactgaaagctttttatcatataaaatgatgcgcttaatgacttaattgagcttggaaacatcatgtgctaagcacatatcaatatgctaattcatccttatgtagtctttatcctttatcttattatgtcttattataacctttcccctgcatataaaaattatgatttgtctttttcccaaataccagaaacaaaaacttataaatatactcttaaacacgaatgttggggaaatgctatataaccatgaaattgttgtataaaataaaacatgaatattaattgaacttcccgacaagcaactaattaaatgtaaatggattaacaaaatttaacacaaagctaatggaagcattgtgcaattcaaatcccttttaagggatctaagtcagttaattagataggatatatgaatattataaatttattaatattgcgtttaattactacgtataaaaaaaattccattataattgctaagagttatacttcaacgtgtggactattttcatacccacctatcattaagatcgttggttttcatctagagctttcctttgttgctgttaaaggttgttaaaggctcgcatttactttaacttgatgtaaatattgtctttttagtttttacacgtggacattcatgaggaggtccatatgactggtttcacaaggttgttagacctcaatgcctaatcaagtacgcaagttacaaatgtcaatgtatggactcaaactagtgggcacaaaaattaatataatattttttaataaaaattatatcaatttaggactgtttggaaatatattataaatctgggatagagaatcacgtccaatttgaatgtgttaccccttgggttacatccaaattggacgtgtttcaccccgtagcgacacttgtcacgcatccgtaaaatgatgtgtatataaatttcaaatgatcataacttttgagaggaatgtccaatccagactattttgtgtcaaaacgttcgaaattgaaaagagaagccctgagcaaacttcgaaggggatttagtcaactattttttccaaaaaattcctctaagtgcctcagaattaggatttaatcctcaatcatccaaaaatttccttattttctactttataattatttaattagttaatttaatgttattatttatttttttaattacttttcttaattttgagcgttttgacatatcgcacacctcaatcagacatttctatcaaaagttagaccatttgaaggacatattacacgcgttgtaacttttttcgatattctaaatttttatatggtttttgtaatgcccggtgttttaagcatgtaattaagcctagattaagcccatgattaagggtaatgagtaggcttaaaagcattcagagacaggcttcacaaaggcttgagaaaagatgaaggtgccatatactctggagtctggcgcctggagcgccaggtgtggcgccagggtctctggagtctggcgcctggagcgccagaattggcgcctggggcgccatggtcactggaatgtggcgcctggatcgccgggtgtggcgcctggagcgccagaggtgctggaagctggcgcctggggcgccaggttggcgcctgaggcgccgcgcgtcgggcagatttctataaatagcctgaaagagggagaaaagagagagaaaagagagagggaagccattgatgagtgagggagcttcgtatcttctccatcgttcatctaaacacctccggcccaactggaaaagtgttcagaaccccgagaggagtgaaaacccccgattgattctcgagaaaagctgagaaatagtgagatcagatttctcagagagaaccccggagagcttgggacccagaggcaaaggaggcccagatcgggcgagtggtctgagggaaagtgattccctggtgcttctgagcatcacagaggtaagaaactcgagctctaaccgttggttctatgttttagatttcggggttttggggttatcttgaggggtgtttttggaggtgttagagccgttattaggctcggactctgtagagtcttatgctcagaggactgttctgaggagtttagagccttgaatcatcattattgatgaagtttgattttggctctgagacagtctgagcagagataaaaggtcgactatttgactagtctggaccttagagcagttaaggaagttgctcaggagaggatatagatgagattgaccggttgaaactggtgattatgagaagttgggttttaggctattatgagcagaaggatgctctatgttagcctgatcagagtcttgtggaggctctgtaaccctgtataggctgagaattatgttatgggaaggactgaggttcctttctcagagtaatgatgttgtttgatgagctgatgttatgatatgccggaatggtctgtgatatgtatgtgttgccttgttaggatttgacatgaggtagcagaggagcagaccattattccagagactggaagtgcaggctcggcttgccaggtaagctcatcgctctgggggattagcccttatctcttgtttatcacccaagtgaggtgaatctgcatgctatgtttgttaaggaatatgtatgtatgaatgtgcatgctaagataagaaaggccattgtggcctggttagaagagaatatgtgagtaatggcctgagtggcctatattaatgatgatgtatagtataagccttaaaggctagataaacggcactagaaatgatactcaagctgtgccgtcatgtatgatgaaccctaggataaataccaagagggatgaacactgtaatgtgttccaggatgtgatgtggtgcagatccgcataagatctgtaatggaatctataggataccgcgatggtatcaggctagctaaggttccctagccagagatagagtttgaggactccctgggatagctgagattccatgggaggtgccactactctccgcttagagtcctaagcgtggataaccctatgaatgtttcctccttaggcataaatgatgatatggatgacgaccatagtggtggtctatgatggtatattctctgattaggagaatagagtcctattataataggaccgatgttatgtgatgtatatgagagcggagaaaggaagattgataggtatgtacatgctgattacgagcatgctatgatatgaatgtacgtttaaggttatgtatgttaggaatggaaaaggatgacagagactttgggtttaagtcccaaagcaccatgtgataaagactttgggttcaagtcccaaagcaagatataaagactttgggttcaagtcccaaagcaataaagaaagactttaggttcaagtcccgaagcaacctattgtcatgacaactgtaagtccttggcagaggaaccaaggcaatataagatgggtgtagtgtaagactctgggttcaagtccccgagcatcgaatcaccaaagaggaaagttaatagatagaaagttacggatgatagaatataagacctcggcgtaggaaccgaggctatatgaaatgggtacaagtaagactacgggttcaagtcccgaagcatcaaatcacccaaagagaaaggtttaatagattatgttggctgtaagccgtatgtatatcacctaaggaattacaggtgaatgagttatgatgataagtgatagaacagggacttaagatccctgaatgtttgattgatgatgaagtcctggactaaagttccaggcagcatatgtatataggttcaggataaataataaggaaaaacaggttatagagaggaaatacctctctagtatgagtagtgttcagttatgaacacttatatgtcatagtacctctgtgagacgagctctgagagtagatatgtgagatgtatggaagagcctgtatagcttatgtttgccctgatgatggcatggctctatgagatgagttgagatggcttaaaagccagtatgaggtgttagacctctgataatgatggattcagttgagtaaccagagaactgggagatgtgttatcactaggctaaggtcctagtgtgattgagtatgtatgtgagctgagatcataccctaagctttgatgtatgtatgtgtatgcttggggttaaaccagggcaagggaggatatcccagatccctgagcttactgagatttttatctcaccccttttgtgggctgtggttttcaggtacttctggagaagagaagcgaccacagagcaggagactgagttgatatgctggagatggtcatgggctgcagatgaagaggaaagaattttagttatatctctgtcttatgttctgtataggcttagagggtgaaagtacacccgttatatgtattgttatgttcctcctgactatctatgtatagttgttatgtatctgcctatgttatagtgtgttgagtaactggatcagtaggggcctatgttgatgttttatgtttatattttatgtttcatgcataatgatatcaagagaaacgatttctatcgcttccgcactgcgttcagttaacgctgacaacgctcttatgatatgtttaagggtaacacatcgggtgcacacggggtgttacggtaatgtccctgattagaaattggggcgttacaagttggtatcagagcggtttcttgatagaatcactatgcatggaatgagaggttgcttgatattgttgtttgatctgacatgagaattgtatgtgaatacactagtatgggcctgatcaacccattgttggtgtacatgtacaatgtcatgcaaggattcagaaacaacaatagagcgactagtgccgtctgatccagtagaggctgctgtggtggctataaggcagattcaggaggatatgtaatgataaagagcctaaaggaggggtgacagaatgttttccccacctcatgtagtatgggcgaatgtgatcgccgtcaggttggtaggtgccacctgagaagggattataggctcagtatatagacagagatggttgttacagcccaagaaaagatgtttatcttgttcataaggatgaccctccagctatgtatgatggacatgtttaattgtcgcagcaaggtgactgcagacgatagagagaatccatgtggtgagggagcatctagatcaccaggggttatagtgtgattgatgtgctggcggataatgccacgaaggatggatgaccgcagcaacatggttaagttgaggccaggatgagattcttatctggcgtatgtggaggcctacttcctggataagtatgttccagggaagttagaaagtagagatgggccgagtttgacagtctaatttaagacatgcctgggccacatgtttgactgtagttgctgagttgattaagtatggttgtttgagaagatccctgttagatgggatgtttctgtggctgagttccggagaggactcagagaggttaaagaggtgctggtgaccagcaatagacctcaaggtatagatagcctggtgagatagtgtcacccagataaggctatgctcagcagattttgaggcaagaagtctatcctggctaagagatacagaggggatagacccagagttgctgaccgagttgagaagggcagagagctgggagttgtatcttcagctcagagatgtcagagtgggctaggcagagaagatttctgcagaggccaggtacaccttttaggtgtgatgcttgcggaaagtatcaccgaggtgtatgccctacgggtcagctaatatgttatagatgtggccagcgaggtcactatgtgaaagtgccctaaaagggataaccagatagagagagagagtctctagaggtactagatgagccgtcagagtatctgacgagagatgaggtatgatttcatacctgatatagttatgttttatatgtgtacatgtatgtatgtttcgtgcctccatttgtggatggagagtaccatgtatgctatgactgattgactatcctattgtagtaggatagatgtatgagattgagaaagacctggtgacagatgagcctgtgatatggaagtagcctcccacgtggagatgtgcccatattcacaggagaagactgcccaggctagtgttttatgatagaggatgagatatagataaagcctccgttagaggtataggcaggagatgtaacctccccatgatagtaatagatgtgttgtatggcagtgagccatatgtatatcctgattgtagtcaggtgttatgtataatagctgcctttggtccaggcgttgagataactccgccatgttggatcgtttgtacatgttgatgcggggccagagggccgatatggtaaagacgtgtccaacaaaggcttggacaagtactaaggttttgaacatgagggtatgaaggtattccatgcctgattacggtctttgactgtgagctgagtgaacagctcagagacgtatgtttatcgatgacagaggatcatccggtctctagtgaggggggaccaagtgtgatgattatcaaagtagcgcagcggtaaactgcgatgtcagccagtaggtggctgagaaggctacgatagtaaccagcaggagatctctcattaggcacatggcttataatgagttaagtttttctgtgatgccaagagagagcgagctggtggacaccatccttatgtaaataataaaggttggtggattggacatcttagagccactatgatatgtttatatcccgataggattttagtggccagagatgaggagagacatagccaatgttatggctagtgtctgatatgtcacacgagtagtgacacagatctgcagtacctcgagataagaggtatatttcaagaggtttagaacccagctaaggctttgtagagcctattcccctcggatgatctgatgtagtgaaccatcgaatccggaggatgtgttaagagtaagagtaccttgaagcaaggtactagctgggtagatacctgcctagatggagttcctggttagtaatgatgaaccatgaatttggatgcggccctgtagaggccagtgataccggactctagtggtgggcagaggaaagagatagaattagtttcttgaacctgagatggttcagtggactcgtgagcagatccgttggatcagtgttaattgcgagagctcagagtcagtgtaaagttttgtgccagacacaaaaccctttacaatggataagggtgatctgagatgtctgaggttgtttgtggttatagatgtaggatgggcttttgagggagagaaggttgcctcccagtgatctgtatggcctgagagttgccatggatcccagatgataatgggatggataagcccaagagtaatcagatgaaaagaatctgatgaatcctacacgatctatgaggacatgtaggtcctaggtagaaccaggttaagcctaatggaattctgaggacagaattctaaaaaggaggggtgtaatgtaatgcccggtgttttaagcatgtaattaagcctagattaagcccatgattaagggtaatgagtaggcttaaaagcattcagagacaggcttcacaaaggcttgagaaaagatgaaggtgccatatactctggagtctggcgcctggagcgccaggtgtggcgccagggtctctggagtctggcgcctggagcgccagaattggcgcctggggcgccatggtcactggaatgtggcgcctggatcgccgggtgtggcgcctggagcgccagaggtgctggaagctggcgcctggggcgccaggttggcgcctgaggcgccgcgcgtcgggcagatttctataaatagcctgaaagagggagaaaagagagagaaaagagagagggaagccattgatgagtgagggagcttcgtatcttctccatcgttcatctaaacacctccggcccaactggaaaagtgttcagaaccccgagaggagtgaaaacccccgattgattctcgagaaaagctgagaaatagtgagatcagatttctcagagagaaccccggagagcttgggacccagaggcaaaggaggcccagatcgggcgagtggtctgagggaaagtgattccctggtgcttctgagcatcacagaggtaagaaactcgagctctaaccgttggttctatgttttagatttcggggttttggggttatcttgaggggtgtttttggaggtgttagagccgttattaggctcggactctgtagagtcttatgctcagaggactgttctgaggagtttagagccttgaatcatcattattgatgaagtttgattttggctctgagacagtctgagcagagataaaaggtcgactatttgactagtctggaccttagagcagttaaggaagttgctcaggagaggatatagatgagattgaccggttgaaactggtgattatgagaagttgggttttaggctattatgagcagaaggatgctctatgttagcctgatcagagtcttgtggaggctctgtaaccctgtataggctgagaattatgttatgggaaggactgaggttcctttctcagagtaatgatgttgtttgatgagctgatgttatgatatgccggaatggtctgtgatatgtatgtgttgccttgttaggatttgacatgaggtagcagaggagcagaccattattccagagactggaagtgcaggctcggcttgccaggtaagctcatcgctctgggggattagcccttatctcttgtttatcacccaagtgaggtgaatctgcatgctatgtttgttaaggaatatgtatgtatgaatgtgcatgctaagataagaaaggccattgtggcctggttagaagagaatatgtgagtaatggcctgagtggcctatattaatgatgatgtatagtataagccttaaaggctagataaacggcactagaaatgatactcaagctgtgccgtcatgtatgatgaaccctaggataaataccaagagggatgaacactgtaatgtgttccaggatgtgatgtggtgcagatccgcataagatctgtaatggaatctataggataccgcgatggtatcaggctagctaaggttccctagccagagatagagtttgaggactccctgggatagctgagattccatgggaggtgccactactctccgcttagagtcctaagcgtggataaccctatgaatgtttcctccttaggcataaatgatgatatggatgacgaccatagtggtggtctatgatggtatattctctgattaggagaatagagtcctattataataggaccgatgttatgtgatgtatatgagagcggagaaaggaagattgataggtatgtacatgctgattacgagcatgctatgatatgaatgtacgtttaaggttatgtatgttaggaatggaaaaggatgacagagactttgggtttaagtcccaaagcaccatgtgataaagactttgggttcaagtcccaaagcaagatataaagactttgggttcaagtcccaaagcaataaagaaagactttaggttcaagtcccgaagcaacctattgtcatgacaactgtaagtccttggcagaggaaccaaggcaatataagatgggtgtagtgtaagactctgggttcaagtccccgagcatcgaatcaccaaagaggaaagttaatagatagaaagttacggatgatagaatataagacctcggcgtaggaaccgaggctatatgaaatgggtacaagtaagactacgggttcaagtcccgaagcatcaaatcacccaaagagaaaggtttaatagattatgttggctgtaagccgtatgtatatcacctaaggaattacaggtgaatgagttatgatgataagtgatagaacagggacttaagatccctgaatgtttgattgatgatgaagtcctggactaaagttccaggcagcatatgtatataggttcaggataaataataaggaaaaacaggttatagagaggaaatacctctctagtatgagtagtgttcagttatgaacacttatatgtcatagtacctctgtgagacgagctctgagagtagatatgtgagatgtatggaagagcctgtatagcttatgtttgccctgatgatggcatggctctatgagatcagttgagatggcttaaaagccagtatgaggtgttagacctctgataatgatggattcagttgagtaaccagagaactgggagatgtgttatcactaggctaaggtcctagtgtgattgagtatgtatgtgagctgagatcataccctaagctttgatgtatgtatgtgtatgcttggggttaaaccagggcaagggaggatatcccagatccctgagcttactgagatttttatctcaccccttttgtgggctgtggttttcaggtacttctggagaagagaagcgaccacagagcaggagactgagttgatatgctggagatggtcatgggctgcagatgaagaggaaagaattttagttatatctctgtcttatgttctgtataggcttagagggtgaaagtacacccgttatatgtattgttatgttcctcctgactatctatgtatagttgttatgtatctgcctatgttatagtgtgttgagtaactggatcagtaggggcctatgttgatgttttatgtttatattttatgtttcatgcataatgatatcaagagaaacgatttctatcgcttccgcactgcgttcagttaacgctgacaacgctcttatgatatgtttaagggtaacacatcgggtgcacacggggtgttacggtaatgtccctgattagaaattggggcgttacagttttgtttaatattttttggatttttttatacaataaccccatttatcccaaaacacattcattcctaacttttccgtactcattccacactttactacttgtttcactcatcccaaagtgcactcaccacacaataattggaattctagcatcccattaattccaaagtgtaacaccccaaaattttgggaattacagtcaattactaaggtaaaatgttaattagaggcagtacaaaaagatttgggggaaaggacaaaaatacccctggacattttgaaaatgaccaaattacccttatgtattttagcaagatattctaaggagaaaatcttatgaatacctttggatgttctggaaatgaccaagaatatcctcagagtgacaagtatagagatatcctgaacatttttagaaatgacgattatacccctcgggtgagtggtgaaattaccaaaatgccctttaggtcaaaaaatgatcagatgactttagaaatttgtgggaacctgagtattggataaaatacttttagacaaattatcaacatggttggtggaagagaaccataaactataatttctaggaattttggtagatattttgaaaagagcttaatatagactacctcaggtatcagaaaatctcaggaaaataatagatacaatctatggagttttctcttaattatgagaggataggattcctaaatgagttagcttagtaattctaataattcaaggcaaaatgaaccaataagaaagtagaatttagctattataaaggaaaaattggattgatttggatttctaaattaagccttgactgtatgatgcaagatcaatggagaaagctttaagaaacttcaagaatggacacatggatgtttaagaagctaggatacatgccattggtccatttgtaaagtaaagtaataatgaattaagaagatttttttgaagtaaacttcctcttgtctcctttgaacacgtgaagcgctcaagacattatttcaacgatcccaacagtcaaaagttagatatgagggttaggagtacacctttaaaattttaaagagatccaacggttaacaaattgagaatgagtattttaacaaaacgggttttgggaagagattttgtgactaagctagcatttcacataagaaagcaattgaagacttgacctacaagcctaactccacgtgcaaataagctaggagtaaggagaagtgaagaagaatcaagaaccaaagacacttggaaggtggagaaatgatagccagtaaggaagaagcaagtgtaaagtagtaatcataatttagagatatttagactaagtagcaccaaaagcttggtatctcacgtgaaaggaagctgaaataaaatgccataagcttagtcttcaacgtacaagagagaagaagggagaaggatgtagaaactaggcacttggaagcttaggaatggttagccaataagaagaaacccagtagaaagctagtaatcataacccttggatattttcaagcttaattatcctataaaaaggcaatgggaaccgaaattttggactgtccttaagggagttcagtcgtgccaaacctattccaaagcctttccatttcatttcttgtaattttatcttttacctagaacaaaatccaaggtctacatgcttaaaagtccacgtgaagcattaaggaaattaggagcaaagctattcaaattttgaagagcaaagcaaggtatgggaaagtttatgataagctatgtttgaatattaagattctgagttgtttctataaagaaccatgctttgtatcataggtgtttgatgaaatgtctcaaagaatcaaggatagctagatacatgattacttgattaattgacttggttttaggttaaggaatgattgttgtataaataattagaacttaacttaatagatgaatgtaaggtacttaagattataggtattaagattattttaaaggaaaacaagtgtttaatggactattttactaaaatcaaggtgttttatgttctactaaaatttacatgtttcattaaaagtgttttgtaaattcttgaatatgtatattttatgctagaattatgttggaaacatgtttatttattcttagaatcttgttgaactttataaagattaaggtttaagtagctttctttcaagaattctataaattcaagcttgcgctccatgtgtttgataattggtttcaatgaatgaaatatgtttaagaattgttggtttgaatttttattgttggattgaattatatttgcatgattgaatgctttaagcaaaggttatgtattattccatgtgttgtgaagttgaaatacacagactatgtgttgttaagtgattctatacactttactaaagttaacatgttgcttggtatcttatgaatctacatgaattggatggtgagaaatgagttaagatgtgtattatgttgatgatgaggtattggaatccttttgttgttaaatgtgttgtgattatttatggattccaagaattttgttgagctatggctgtatgcttagatgttgtgtaaagctttatgtgagggtggaaagaagctttacgtgttgtttaaaaagcatatgccatgagttgtaaagaagtgacaaaatgaatcattcatgcattttcatatgcatatgccttgcgggggttaagccgtgaagttgttgccctacgggggttaagccgtgaagttgtctgtcagatagctgaaccgagtccatgcgttcagaggtgtctgaactgggggggtaagcatagtgaggaccacaccaccatgatgatcacatgggtggaggtgacattcctacgcgccactgacctaccctgactgaatggataggtgtgccactgggatgaggctatcttgactgttgccactgatgatgagatgttgagaaatcatgcatcatataaagaagaagagcatgcatcacatgcatcacttgatgagtatgttgcatatctgtgtgctatgttgatggtgtgaagtatgcatgtatcttattttataaatgataatataatctcatgtgtatatatatgctttcatatatgttttattcaaaccatgtttgtcataaacttaccctattttgtgtctgtggttgacacctgtgatgatcccaatttatttgggcgagcagatgaacagtaatagctgagcatggatgatgaattgaagatgtgcatggatgttgagttaaagatgtaacaaagatgttgtaatttttattttgtggcttatgagatgtatgtggactgtttattaatgggcctgtaatatggactgtattatattctaatttattgatggattgtattataattaaaccgtggagagggaattcgttcatgatataaacgactaatagaatttgcaagcaaagcggaaagaaattatgatgaaatttataactaagataattctaatacaaagtggacacgagatttcatctaaaatcaatcaagtacgagagagtaaaaggaggcgttacacaaagcgcacttggaacggtgaaacattgcagaactctataaatagaagtagaattgcgtgagacaaagtgaatcaaattgaaatgcaaagaattgcattgctcttacccagagagataaaaatggtgacgatgatggaaaaggagatcacagaacccaacttactcgcacgattgatcattcaccatgaaagatggacgattctttctaatttcctttcttgtttggatgtctatgttttgaccacactaattttatacaattgagtctttcgattgagagaaagtctgagtttcggtgtagcttcggtgagtcatcgatcctttctattccctttctcgtttcaattttttcaaattccaaaataaaattgaaatttttattaaataaaatattacacgaaaaattagttatataaaaaattcaaaaaatattaaataaaatcatataaaatttaaaaaaatatactaaataaaataatattaaaaaagtaaaaaagatcatatctatgataaaagatcatatctataatgaagattagtataaaagtactttaaaattagataataataataataaataatattaaatgatattttatgtcaaaaattaaaacacgctaattttggtctctatttcagtcgttaacaatttttgcgatgaaatatcgtggtcacaaacattaaaaaataaaaaagtcacaatatttcgtcacaaaagttgttagcgacgaatttagtcacacccagtttaagcatgactctcaagggggtaacacacccagattggacatgcctattcacgcccaatttgggcgtgtctacctgctctatactgataatatgtttcaaaactgctccaaattggtaatttttttattgaaaagtattatattgatttttttgcccaaactagttagttagtagccaaagaatttccaaagaatgcaataaaacaatattgaatgactgatttacttattaattctactaatgacaattattaattcataatctaacataaaaaccaaaatggacaatttataaaattaggagactaaatgttacaattaaaaatcaatacattaaaattatatatttggaaaattattgtgaaacaaaattacaatttaacctaaagaatttcaacataacagcaagtaaatgttgctttacttcaaatcatagaccaaacttcattttggtgcataggtttcgaaagataacccaaacaatttctggaaagcagaatcactaacataaccaaaactgaacactcactaaagatcaaacattataaacgcaggggaccactaaactaggtgttgtatcagtggaggtcagtatcagtatggcaatatggccactactttgtctgcctaatttaaaagccattccagaaagatttctggatcacttaccagatgaataaaaaaggtttccacttaactttcttttccttctttttggatcataactctgaatgaactttattagtacgaatcagagatacaaaggaacactagagaaagaatatgacaataatagttgaaaacagcttttggaggaactcaaagatgagcctctgcctctcccccacgattcagttaagctatttaccattttttttccagctccgtgactatttagatttgaacaaatacaagccgtagggcatgctgccaactattgtgaaactatttactcctacttcttgaatattcattcatcttcaagtttaatctatttgactaatttgtttctttgctcgatacatgttacgaatttattgatcaaagggatggagatcaaactcatgaaagagataaagaacatattgatactcacgatgtaacatattcaattgattaaaaagatacaaaactctgtacattgatctgctgtttatagaactattctgtaactaactcctaacatgagtatcaatataatcaaatataaatccgccggaacttgaaaaagctttaaataaaggacctaacaacaaacattgcaataattgttgactaagcagaaaagaaatttaaaacgaagtacaaaatgaagatggtcttcagacttcatacacttgagaatatatggtactttcgaacatttgtagcagaaaatcaacaaatgttcgtacatggtaatccattaagtggtgatatgttaatttctttcatctctcaatagagacagtaatatacttgcacattatatttggtattatttaacaaaaaatttaatggaaatggcactgaacctaaggcattaaagacttagaactcagaagattattattattattgttgttgttgttgttgtttttccctaaaatagttcaacatgtacacaatgggtaagaaaactatcatgtcatcccaattagttcagttaaagttgcacaaatccaaatcatgcttttgaactcaataatcatcaagttcattcaagatatcaaattatcaatcccttctacagagccagtgggaatgagggattcagttgtgaaatctgcattagcaatacaataatgcaactacaaacctcaaattttaggctttcagcacatatacatctcagattcagttttgggaatcaagcaccagcaaaaagcttccacctgtgccctgctaaacttactaacagtaaatttcttaacttctacttctgcatgactcataatacacaagtaagctgcaggtaagatatacgaatgcatttatttctctatgaaaaaatccaacttcatccacaaatggaaaaggcagaaagagcatgcagtgtgcaactctttttcaaagcttttcttttcaataccactagcgattttatgattactgccaaacttttgaagcataccatcagtttgtctctagagcaatttcattaacgtctatgtctgctatgttctctttcccaaacagcgaaatgcacagtggcctgcatgaagaaggttatttgagtctacaaagaagggagaaaagaattcacataattactcgacccgctaattcacacattatttacagctttcataagcattttcatttcatattagcattccaccaattttaatcacataaacttgggtgtgtctgaacaaaaatctttatgtcaatttatgcattttaaggaagaagctcaccaatttggttttcgattcagcttcttgagggtgccagtaaaccctgaaaatgttcccgatagaacacaaacggtggaacctagaacaaggagtttataatggattcgagtagatgaagcatctgtggctttgacctggttagaagcttttgtaaatccccttttagacttataatcaacaatagcatttaacatatcatcgggttataattctgtattgcgaataccagagtttagggcaccatttttctcttcctcaaaagcttagtcagttttctcttgttcttcttttgcttgtctgaagatagcctccatatcttcagcagacactggcatcggtctattgatctgtctctttctgcaaatgtgaaaataattgcaagttttcacaggctaaggaggaacaggaaaaaaatatatatgcattagatttaagatattttcaacatcataaaacttataagtgtagacaaactaaaaaggcacagcccgttggaaatcttacaaaatgttagcaactgaattcatcataagttgatcaggtatacccctcaattctcaaagacaatatcacaggatcaccttgtttggataagtttttctataaatacttatgggaagaaaaaatataaaggaaaaatgaaaaaatttctcccataaactaaaattaatttatcatcaacatcatcatcaacagcacctttaacccaaattaattggggtcggtagtagatgaacccaatgataaatcgaaaaacaaagcaaaagagagaaacatagtttaaataacagaatggtgagaggaaaagagaaaagaagaaaagaattaaaacagggaacaactggaacatagaactactaaagggtttaaccctccatcagacttatagcttttctccactccgtcctaagacataccgtccgccaatctaaatctcactccattaggtcttgtttaactacctttccccaggtaagttttggtcgacctctacctctctttgtatctagctcttggtaacatactcttgttctaacaggagcatctaatggtcgtctcataacatgcccaaaccatctcaatctatgctctctcatcttttcacatactggtaccactgatacctttcgtcgaatattctcatttcttatcttatccatcttcgtgtatccgcacatccaccttaacatcctcatttctgttacctctattttatgctcatgttgcctatgtgctggccagcattccgctccataaagcattgccggtctaacagctgttctatagaattttccttttagcttaataggaatcttgcggtcacacaaaagccccgatgcactccgccatttcatccaccctgctttaattctatgacttacatcctcatcgatctccccacctttttgcaacattgatcccaaatatctaaaaacgtctttcttgggtacctcttgcccaagcagatgcactgtgtcttgctcaccgtctttaatcctcgaaaactcacacttcatatactccgtcttgctcctacttaccttgaatcctttagactccaaagtgcttctccacaattccaattttttattaacgccatctttggtctcatcaataagtactacatcatctgcaaagagcatgcaccacgacacttcttcttgaatatctttcgttagttcatccatcactaaggcaaagagataaggactaagagctgaaccttggtggacaccgaccgtgatagggaaataccttgatgttccattacaagctttcacacatgtggtagccccatcatacatatctttgattgcattaatatactttaatgctacctttttcttctcaagagtccaccataagactttccgtgggactctatcatatgctttctcgagatctatgaacaccatatgtaagtcttttttcctttctctatacctttccatcaattgtctcatcaggaaaatagcttccatggtacatcttcctggcataaatccaaattgatttactgaaatcttggtctccctccttagacgatgttcgataactctctcccacaacttcatagtatggctcataagtttgatgcctctatagtttgaacaattttgaatatctcccttgtttttgtaaataggcacaagcatacttttcctccaagtatcaggcatcttgtttgtttgaagaatcctattaaaaagattggttaaccattttattgccacatctcccaatcccctccacacttcaatagggacatcatcaggtcccaacgctttattattcttcatcctctttaaagcctctttaacctcatatgtattaattctgcgcacaaatcttctattcagatcatcagaaacgtcctccaattccacctcactcttgtcaccatttccattaaaaagattgttaaagtagtgtaaccatctttcacttacatcttcatcccttaccaaaagtttttgattttcatccttgatacatctaacttgggtgagatctttactcttcttatctctcatctttacaagtttataaatatctttttccccatttttgctcccaagatttttatacaaatcatcaaaaacttttcctctagcttctcgcactgctttctttgcatcttttctcgctactctaaatttttgcaaattctcctcattaggacatttatgcaaagatctaaagcattccttcttctgtttaatagcctcttgcacctctccattccaccaccatgtttcctttgtaaaaactctgtttcctttgctttcacctaacaccctccttcccacattatgaacacatatagccatcttattccaaatttcattagtttctccgataaactcccacggtccttcacgcaacatattttccataaattctaattgtttctcctcctttagcttccaccatcttatccttggattttgatccttcttcctcaaattaagaactatgttgaacctaacatctagaactaccaacttatgttgtgtcgccacacattctccaggatagaccttacagtcaatacatgaatttctatcttcccgtctagtcataaagaaatcaatttgactgcgattttggccactatgatacgtgataagatgagactcccttttccgaaaaaaagtgttcgctagcatcaaatcataggctagtgcaatgttcaagacatcttctccagtctcatttctcgtcccatacccaaaaccaccatgaattctatcaaaacctccattgtttttaccaacatgcccatttagatcgcctcctaggaaaatcttctcttctcgtggtatccctcttagaacctcttccaagtcttcccaaaaatgggtcttttcatctgataataatcccacttgaggtgcatacacactgatgatatttacgataagatccccgactacaagcttaaccatcataatcttatcgcctttcctttttacatcaacgactttatctctgaaacttctatcgatcataattccaactccattgcggctcttgatattacctgtgtaccacaacttaaaacctgtgccctccacttccttggccttctctccaacccacttagtttcttgcaagcaagcaacattcactttccttctggcaaaaacatctgctaactccctcagtttacccgttaatgttcctatgttccagcttcccaatttcattctaaacccctgggctgtgtttgcccgccacgctcgcccatctgcgtgttgggacccttgcctttttgtcaccaaatccgggtggagacctggcgccttgcctttcggcatggaccctaacatctttttcactacatcccggggtcgatgtagcgccttgccttgtggcgaggaccctagctcttttttcgatacatccggggtccgatgtaacgcgtcgctatgaagggaacgccccaacgaaatatcataaaggttcatcacataagaatagctaactttttatggccggttcgcaactcctgacgccaaccctcctcctttatcctggcttgggacaggccatgcatgcatacacacataggcggagttaaactaaaattaatttatgcacaagttatttttttttttggaggttttgcttatgcataattaaatttagctttttgaagaagttaaaatcatttagctttaaaaaaaaacagattttaagttatgcataagctaattataacttattattacttattagtgaagcttgtttcatttttcttcttattttcttttcttgtaagatcttgtggagaaacttatctaaaaagtgtctatatttatcaaactttccattcattaaatagtgtaacttaaaaaaattgtactttaaccatttactaacatgtcaaataaacctctcatatcttcttctactgctcgggatactcgttcttgttcctctctcttcttttaccgttttcttcttccttcttcttcttattgctagtaattaggacctcttctaattgctagtaattaggacatgtggatttctttatttttttttgttttattggttaagaacttaaaaataattaactactgcatcttttattttttagtaaattttaaatttattttactctcaattttaataaacttaaaaaagataggaatacaattcctaaataagtaaatattaggtttaaaatttgttaaaacaaattatattttttttgaaaaaaaagtataactattttagcatataagtcaataagataagggaaaaattacatgtttttgtaaaaggttgaaaaaaatgcactaaattaatttttggataaaaaatttgccaaaattttaaaatttaagtgttaaaagtataattagactaaaaaatactatataaaaaatagaataatgtcaatcagccttaaaattatataacttaaatctatataatttaatgcaaaattgaatcctgaatattttaatttaataataaaataatttacaaacttacgttgtgacatagttgttgtagtttttataaactaaataatttttttgttattttaaggattaaactacgatagattataataattttttatatttaataattagtataattgttagaagcaaaaaattccaaaaccttaccgttcaaactttggaagaaagggggtgattatagccattttttcgcgccaaagttttttatctttccatccatttaaatacccttctccttctcctggaggcaaaattcttgtacggtaaatcacacatcttttcttggtggaaagcagaatgtggaagcaagtgaatgttagaaacagcgatgagtcgttggggagaacgagcaagatcacttcggttcttgtcgcctccatggttgataagtacctctgcgacaatgacttctccaacacgcgttacactttcgcaacgaggcatcttctctctttctcagttcatcactcaatcaggtttttcgacactatattttgcaacctttttagactggctttctttcatgacactctcggccataagatgtattatgtgttttcgctaggtctcctgaccccaatttatttaattgtttctttttaggatccgaaggatttgttgacattggaggcgatgcttgacgagtatatatttttgaagaaacaaaatgcgatactgaatcaaggaagggtcaccgtgatgcaagagagaaagaggattgaaatcttttggcaaggcatgcagaatgccctgaacgcttacaatggttttcagaggccacccccacctatcatcgcggcaacgaatgcaaattttgcagaagtttatccaccaagggtttgtgacagaactcctccaggtacgtttttttattttttaccttaactaatcatgagttgaattattggttatcattgaattttcttgttttaattcaagaaggtttaaaactgtaattgctcagagctgtcactgaatccatagccctcaacccattcccattcagcccctatttaatacattaaaataattgtcccttgtgtgcatgcgagtcatttccatctccaacccatgaatttaaattccttttagggggttggcgttttaggtggttgttgcatcagccttatttgcttgcaatcatgagttgaaatattgatcattattggatgctctggttttactttttaaatgtgataagttgttcttggtttctagatgtggtctacaacttcaattctttagagctgtcattgtgtccatagtccacaacccattcagcccctcacttaacccattgaaattatagggctagtttggatagaagctagaagagcttttgagaggttcttatttttgttgtgttagcaatcttcattgtgaatgttattgttgtcagttgtagtaactttaaattgaggttgcgatgctacagttgtggatgcgttgcgatcacataagctggtgttgatgtgtttaggttatatgaatgatgttttggtgttgctttgcttttttgttaggtgtttcttctattgcaagtattggttctgccatgcaaaacacatttaacatacagtcgcagcccaaacccatcaacaccaatgtggacactggaaacttctcaacacccatgattagtgcgtctgacaagaagagaaaagatactgaagcagtaaatggttgtagtgcagttgcaaagagacgtcgtggtagaccacctaggagtaaaaacccagtccaaggtataattgtctgtgcaactattaagtatatgctaagctttcatcatgtcatcaattgaatttttactctatcttcatctttagggcaaaacatactgccacaatcaagcaatgttgtcaacaatcaagtagtttcttggcaatcttcttctgcaactctaccatcatcagggaactgtgcacccagcggatcacaggttcaaggatccaatgttgccaaaggctcattcaatcaccctctgtttttcgatccaaacaattcacaaattctagagacacctcctagaacacaatcctctcactgtgatacatatgtatcccctactaattttcttgttgcatcatgcaatcaagatgatagtccctcttgttgcactatgatttcaaccaatggagtcatggttgaccctgaaaaacaaatggcatataaagagagcagtcattgcatttctccaatcgaagcagatacagccaaagcaagtgagaaggatgatgtaaggagcaaactgaactttgatgcctctaatatgcctaagagcttggacaaatcactggctaatgaggtttctacatctgagtcggacaaggaagttgacatatctgacatcgatttttcaaacttggactggccactcccaggaatcagtgacgaagatttttcctttacgatctaggtccaaccgattccaacgataatgcttcaagttcaaggtattttatctatttaatgttgcaattccttctttgttatttaatgcttgtatctgacattctttgtatctttatttaataggtcttctcatgaactgcaagtaagcacagataaatatttaaatatacaaggtaatcaaggtcattgtgtattcttcataattttgatctaatctactgtttactgagttttttttttctttttttttaacgttgcaggccttgatagtcaacatgtctgactgtgataaaatctgaaacaaagtggacctgcagttgcccttaatttgggatatcaaacaccattaatttgttccttagcctctttgcttgtcagtaaacttataggtaaggctaaaatgattaatcttttagtgattgtagatgactttagcccatgttgtttcttgtttacttgaaccaaaaaggaataagttacagaaaaagaattcatttgaaaaacttcttccgaagtaacaaatattgttggttgggtagaaaattattccatgccagatcacaattgattgattggatgttagcagttactaattactataatggaagagtttgactatttttgtttgtcatttccactaattatattttcactgttcttgtgcaggcagtacaactgagtatttgaacttagcagtcaataaaggtttatgttagggtaaatggatccaatgcagctagtaatttgttatgtgcctctgataacattcatcaattaaacaattggtttggcgtgggatggtataactaagcattgaagtgtaaagccttcacatagttgtgtttctattttgtcttgagaatagagctagaattgactttcttcaagtttggcttgattactagttactctaatggaataatatcagctgagtttcattattttaatttgtcatttccaattcacttattatattttcatcactcaatacaacacagaattttgaagttacttgtcaacaagatttataactttgttttcttttaattggcaaaaagaatatacatatatatatatgtatatattataaaaatggtaccagatgtacctaccacatgatacaagtaatcagccagggatcagcttacattggggttatagaatatttataacttaacagctacaaattctcaataacccacgaaaacagacccaccatcaatagtaattacacaagcctaataaaaaagatacttccatcctaatgaaatccacctctgtcaagctttgcaccgcgtacaccagtaacaaaactgcagaatttgaattacaaagtacactgcatcataccaatgacatgcagttgtgttactcatccactgaacaaaagagaagtgaaatgccgagtcgaattgcttaagccaagaccatgatacaaaagtgatatcatcaattacacttctgctatcaatctgttgttgattaaagacaactgcatttctcttcttccagacgcagaacactgccaagcaccaaatagtctgccaccacaccttgctagagcctgctgaacccatgttagtgttttgccaaaatagatcatcaataaataaggacagtaccgtggcaaaaccacctatgttagtgtttagcctttgggctttgggggtgccttagtatgccacagtagacaaaaaaatatccttgttcacttgcggtctatttacaagagatacattgatataattgttggacttgctctttttcccactcaaaacactatcagtttccacctccacccactctcccacattgttaataagaccatctttgtgttcggattagataaatagcctaggaaataaattaattaattttgatagccaccactttagggatttaaaaaaaaagtgagagatagataagagctagcttgttggagatgaatttatgcttccaaagagcttgctcgttggcgaattttttgataataggctcccatatttgttgtttcttatatgttaagggggaatgaattcagtgtagtcactcactcacgcgattagtgattaataaactgtgtgataaacatcatgattcagagatatcaaactacgtttaaatctgatttattacataacatgagtgacttgatcttcatctaatggtttgaattgcctactacatacaaatgctgattgcagacaatgaagagacttagtcagagaattttgttttgttttaatttatagtttataataaaaaaaatattataatggctgaggacgtatagttgtctaaaaaccttagattggattctcttaatttgatttttcttttccattttgtgattctaatcacttgaactttggaatagaaatgccataacatgaggggtctttccattctttttggcttcattttcattaggctttgttcttataaccactgttttgaatctaagacaagacggatccaatccaatgcttcttaaaaaccagcacaaaaccattaaaccagtcaaatattggtaaacccagttgttaatcggtttaaatgatttcgcttaaaactatttttttaaaaggttgaattgattgaaaaccgataaatccaatggttaatgggtttaaccagtttcacctaaaactattttttttttttactttcaaaacgacattgtttttattttaaaaaaatattataagttatgacatttttaagtgaaatttggtttttattattatcaatttatgcatattatgttttatttatttaatattattaggatattatattaaatattaaaaaatatattttattaaaaccaaatcgacttaaactattgacccttttccgtttcagtttgataatcagtccagttctaaaaatattgcttataactcccttttatagtacaagaaactgggccatttgggtgcaaaaaggagaagcttttgctttttttcaagcattggtgttgattgctgaatcgggattccaatctgttattttttagatagaatgcaagctgctggtagaccacattttttctactgatcagaatttttttgaatgtggcattcttattgatcatataagagatattcttggaatttggccccgcttcaaaattcagtttcttacgacatttgttattaatcctagccatcatattttttcttgtattccacaatgtatttccaattatgttgcaatggaattgaattaagtttgctactgcaaaaaaaagaaaaaaaaaagcttgggccatttgaagccctcttcctctatatgcatacacattaaattgttgaagaatggaaagaattgttttaatatgtttttctagaagtaattataggagaaggaaataaaaagaaaaaaatgaattgagttttttcacaaattaaaattaactcatcattaaataattgttagccaatttgtaaatatcttctaatttttaaggtgggtttggttgtgaagaaattggtgagaagaaaagaatttttttttaaaaatagcatggatctctattttattttaaatatttcttttcaattctctttcttttctctcttttataataccaaacacacaaatgagataagttttataaatccattaatgattaactaatggaaaattaattttaacctataaaaaactcatttattttttaaattttcttctcttattagtgcttttgtggtgtatttaatagagaagaaagaaataatcaacatcaacatcaacagcacctttaacccaaattaattgaggtcggtggtagatgaacccaatgataaatcgaaaatagagcaaaagagagaaacattgttaaaataatttgttttagacttactccttttacactctaactttaattaaaaaatatatttgtatcctttaaatcaagcacaccattaaagaagattatccagtgaagttgctttagctcttattccagcatctcattagaaaaccattatctaagcctgtgtgaaagatttgttcatgcaagtaatgttttcttactagaattgccagtgtggtgtccgtcaaggattaatagcgtcgagtggatgtatagcttgataggtactctctttaatatatatagatataatattatgaatattaaacaacaaaagctggattagcccagttggttagaatgtgttacccttaagtccttaactacaaatgggaggttcaagccctccttctaagcccaaaatttgctacgcatagatagtggtattaattatgtacataggatattatactagttagttacaaaaatacaaaaaaatcttaatattattttaatttttcctttcaaaaagattctaaaccactggtgatctagtaattcttcccttatttacttaacaactatctaaaaactttaagtgcatagatttaacttattgtatcacttatttcatccctctcacacattatctatttagtatattacctgtttactcacattatctttgaaccgtttttttttctatgatattctctgtcttatcacatttttctctcttctcttaccttcttcattcactcaatttattttctctctcttctaaaaataaactagtgaaatatctatttatttctccattaaccgcaacatcgtaaccctcactgaagatgcatgtcttttgccggtcattgtgactacaatttcttcataatatttttcatatttttagtgatttgtagcaacaaaggttaacaattttattagtttctattttcttggttgattttgttttgccctaattattttcttagtttttttccctttatcaatatttctctaatattgtcaatatgaactaaatttgttaaaaatgattatttgatatggcctatcggtttgtattttgtggaaaagatactaatcgggtctttataagaacagatggaaattagagaatttcttaattatttatttgattttgttctatactgatttttggtttgcaaattatgtgtttgaccaaatgtcataatgacatttttgggtatgttccttacttatcatttggaaacttttcagttgattctgtcggtttgatattatcttatagagagaaatgaagatattacttgggtaaattgaaagagaagagctaaacaagtcaaaagtttactagcataacattaattatacatgtttccgttgttttctttaatttaagttcataactaagaatattttgtctaacaacaaatgatgtcattttgaagtcctattttttttttgtctatatatatatatatatatatatatatataccaaattcattttcaactaattatgacatacatgactggtttttcaactccattgtacacaaattctcttatattatgatggctacatgatttttcttgcttttaggatcacttcatctacctactatttactctattaataaaaataatctcatttatcatgttctctaaagtttaggtttcacaagcttatttttttgttgtttatatttcactatctttcgtcgggactaggttgaatagagctgtcatgggaacaaaagtgttaatgaataacaaaatttaatggaaaaacctaccttagtaccaagcataataacatagagtatactagtgttgttaatttcctgattatggttataggtgccatgaaagaaatcgaaacaaacaacatacatgtatggttagagaagcttctcagtcaattccacatttgccttcacatgtttctctacttaggttgcttaattttatgttataaccatattaaactacttataaaaatagctttatattataattccaatatatatttttttatcaataactttctttacttttgcaactcatcataattctatcaacatatccaagcacatttttcagagctccactatcctttaattatttacaatttcaaaataatagctactcatacaaatatgttggatttaacatatttatatgtataaatttgtaacaatataattaacatataatataagacactagaataatttttgtaacttttttaataacatttccaatcattattcataaatatctacattatttaatagactttattttgcaccgttgccttctccaccaaactgtgtcatgctataataactaaggctaatatatatatatatatatatatatatggtgccagtagcgctagtagtgtcgccagtatcgctagacatggccccattagcgctagagtctctggttcccggtgcgattagtgccagtagcggcactagtagcacgggagacgcgccagagaccacttttctctggaatccggtgccaatagcgccaggaatggggtcgttagcgcaggacccggactgggtcacttaaaaagactttttctctctcatttgtgagccaaaaccttcactttcttcttccttctctgttttccaccattaacaagcttggagtgcttcaaatctactcaaccattgaccaaaacacttcgcttccagcatgaaagttgaagtgaactactaaatgagctagatttcatcatcagtttccattgaaaaccatcaaactgagagatcgttttctctagggaacttcacaaagtttaagtttggaggggaaatgagccgttttaaggacattcaagcttggagaagttgtcctctagccttccttatcgttttagaggtaagaaacacaacttttactaattatttaagaatttgttattgaaatgaatagtgacccatttgagttagagctaaaattaggcttggatcctttggaaaagtatgcttaggaggttgttgtgatgaaggattagccttgaaatataatttttatggactttggaatttggctctgaagaatgtatgtgtaggaagaatgttggctgaattgatgatgttatggtatgtatgaaccctagtgcttttacaagatgtgtttaggagactatataaacggtgaaaatgtgttgaagtaaccattttaaccatcttgttaatcattgaaatgtggcatgaatatagtattgaactctttgcattggattaaactgtgatgatatgttgtgtgattgatgagattttctagccagtaaaatagactacttatggactccctttggaaatatgcccttaagtggatgattttcccttgaaagtaccatagatgatcaagtaaatcctgagagaatgtgtccttcaatggataatctttctcaggcattgacatgaagtcctgacggaatgtgcccttaagtggatgatcttcctcaggcaatatgcgcagagtcctgagagaatgtgcccttaagtggatgatctttctcactcaatgatacggaaagtcctgagagaatgtgtccttcagtgaatgatctttctcaggcattttatatgtatctatatttgctatatctgtggtgcattcccaatgttggtagtgcccaacggaatgacacctgtgttgtgatatgaaaatgataggaatacttcaatacaaccaacaggggggtgaattggttgaaccttggtatttaaaaattttcaaatcagagtttccacagggtctttatcacttttaatgttttgaaacaaagaatcttatattcaatcaaattcctctgttaagaaaatcaatagacaaatgaaatctttctgtgcaaataatttgattcacaaccaaaacaataaagagatgaagacattagaataaagatcagccacaatttttatactggttcacttcaaacactatgaagctacatccagttcttccactcaacactagaatgaagttccattattgcaaatgtatgttcttacaagatataacaagcctctctttatcaaccctagataaagttcagaaattgaaaacactattagattcttagagaccaaccccactgagaacactactcaacaacccctagagaaacactatctctagtcatcatgcaagaaacccatttacaataagccaatctttacagaaatcaaataatagatttacaaccacaaagaataaggaacgatttcacctgataatccaatgaacaagatgcatatgtatgattcactaggttgaaagaaagaataacacattcaatgcttccctttccttactctttgaaactctattatgcttcactcttcaaatcaaaaacccatatgaattttgatgaagccaagatgttttagaactcagaaaactcactaatgaaagctcatgaatttttgtgattgcccagaatacgaatttctcaactcttaaaatcatagggcaataggttctatttataacagttttttaactgaaaataatcgattaaacacgctcctgtgatcgattatttcgcatatgtaatcaattgaagtgtttatgatgtgttctgggtttgagctatgaacattgtaatcgattatttcgtcacgtaatcgattaaatcagacactcatgattttccaaatgcactgagtaatcgattactgaatttggtaattgattaagatagacagaccaatattttcaaatgtactatgtaatcgattaaatcaacagaacatgttagccataggcatgatatgtaatcgattacgaacttctgtaatcgattaagacagacagtatgatatttcaattttagcctaggcaattgattaattcgatatgtaatcaattacattgttcttggtttgttttccagaaggcacgaagaacaaaataatcgatgccaacatatctgtaatcgattaaagcaggaaaacttcatttttccaaaaacttgattttaatttgccttatttgttaaatacttttgaattggtcctcattctaacaatccgaaatgaatgattatgcatgatatgcacattggattatcagataacacatctttccttttacatgaatcaattgatattcaagcttccaaggcactttgcaatgaggcatgttgaaagcacaaaactccaaagcttggttccatgtccatcctttcatatctcttcttgaatcaacaatctccccttttttggctttaaacatgccaaatctttaagttgattaagcactgggacttggagattaattgagaattcaactgatgagcttcaagcttttaaaccctgtaaattttcaactgcctttgccaagatacaagtgttaaagcatttgtgattcatgaaacattcaattaagcattatataaacttgttggtttccttttcatacagttgctccccctaaattccagcaatcactcaattcaaattttttggcaaaaactgaaccaaaaacaggggcaaacagagtggttttcaaatcactccttcttaatcaattttccttatttctccccctatttggcttgttaaaagtcaagcggatattgaacagaaaatgcaattgccattgaaaataagtttttaggaggtagtacataggaaattttaaacaaacttaaaacagaacttgaataaaaacaaatacaagtaaacgaaaagaaatctaaataatcctaaaagtcaacagaggcattatcattcatattggcctcaattgaatcaagtctatccctaatttcttccaaagcttcatgagtctcagccttgaaatcctcttgaagcttgagcatgttgtccatcttttgaatcatcaatgattcaaagtcagaataggcaggctgtggatgttgttgatgttcttcctcttctgaatcagccaccacttgttccacatcagcagcaacaacctgttgatttgccatcacccatccattgggtgttttcctcatccccatttttgtaagatgtttttccttaatcaaactattggaggaatttgtgttgtcaaccacttcattctcaacatcaatgttgaagtgatcaatcagcctagagacaaaaataggatatgggaatgggtagttcactagcctcttggatttaagcatgatttcctcaaagataagcacccaattcatgggtatattgttcttcggcccatagaccaattggaggtcttcatcagttgcttgggcatgatttgtggccctaggtgtgataatgtatgttatgatgtaatgaaggagcctatcctcagcagtcataagtcctatacccagcctattccttagcctcatatgaggatcatgaagcatctctctataggtgtccaacttactataaccctcaggttcctcatcaaaccttctagcaccctcacaaaccaccccaaccacagattcccagatgtcaggagttattctcatctcaactccttttactttggactttatgtccccttgcattgaccctttcaagcaagtgtaaaagactttaactaaatcggggtaaaaagtacccttcatttctaagaaccttctcagcccttgggcttcaagaaagaaaggaaattggaatccctccctaatgaaccaatcaagttcaaggtacttgggagaagtgtaacgccccgatccactaatcagggtcattaccaaacatacatcacaattaaacagataatcaatcagagtttaagcagtttggaagcatatactaaaagtgacatcatcaaatgtcatctgtataacactgtacactataatatggtgaatatacatacaagctcctctgtacagtacaaaactatacaatatcccctcagggtacaacaaaaatccataactaaaggctaaatacaaaatatctgagccacaagctcatgttctctagcctaaggtgtccatcagcagctaatcctgcataggcttcttgccttgggatctctctgctactctggaagaatcacctgcaaaacatagccccacacaaggggtgagatataaaatctcagtaaactcagggcccttgaaggtatttccttcccctggttcactgacaacacacatatatatatatatatcaaccacaatcacaatcatcatcagtgaatcactcaatcaatcatcatgcacaatacacctgaccacaatcaggctatacacatccatcagccaaaaccaaggcatactcatggcatacagccatttatcacatcaataactgccacgcagaggctacatctaagtatataggaacatctcctcacagggaggctacctctacatactcggcacatctcttgcatgtatccctagcggaggcttcctctagatatataggtacatctctatctcgaggcttcgtctatatatcaggcacatccccttttggtgaggctacctctgtgtacataggaacatctcttatcacgaggctacctctatgtatcacagggccatctcatcctctaacacaatacaattgcctggggaggctacctctgtgtatatgggaacatctccacgtaggaggctacctccatatcacaggctcatctctcaccaggtcttactcaatctcaaatcatctatcctacgacaataggatgctattcaagcacaacatgcataatcaagtttcacatttaaccagacatgccacaattcaatcacatcatagccatgcatatcaatcccctatcacagggttcagttcacatttcaggcatatcagatcaatacatctcaatctccctctcatagggatcagaacatcagtacacagcatctatatacatgcatactcaagtgtcataatcaatcaggcatgctaccaatgaatcacagccatacacctcaatttccctttctcagggatcaaatacacgtcaatcatcaatcaacaactcatggccatacataataattacccatctctgggttcagatcaaatgtcaagcatcaattaccctttcatagggttcagacatcatctaccatttattcacagcattatacacattcctctactagtctatacacatatcataagcataatcccagtggatatatggtggaacgcagcagaggatacacaaacaagaaccaagagcttacctgctctagacagatcaccagctctcccgacctcgtggtcaacaccaccagagctctcacgctcacgtcctacacaagaacaagtatataacatatcagatacggttctagaccgttcaagcggaagggaactctcatccttcctataaacataaactaatcactgtacaagtgatcatctgatcctcaacaggatccctctcagcctgtatcaggctataaagtctcccttaagactctgatcaagctataatccagcatatctctgcttacaatagcctaaaaccaacttctcattatcatcagtttcaactcacaaatatcatctatatagtctcatgatcaactttgtcaactgctctaaggtccagactaatcaaatagtcaaccttttatctctgctcatactgactcagagccaaaatcaaacttcatcagtaatgatgattcaaggatctaaattcatcagaacagtcctctgagcataagactctacagagtccgagcctaataacggctctaacacctccaacaacacccctcaagataaccccaaaaccccgaaatccaatacgcagaaccaacggttagagctcgagtttcttacctctgtgaagtccagaaacaccagggaatcactttccctaaggtaacttactcaatcaaggcctctttcgcctctgggtttcaagctctcaggggttctctcagaaaatcaatctcactatttctcgctcttcctctagaatcaatcggggtttttctctcctctcggggctctgatcactttctcagttgggtcagaggtgtttagatgaaagatggagaagatacgaagctctcaaactcatcaatggaggtttggacgaaggaggaagaagaaaggaggaaaaatatcaagattttcgagcttctgggccttttataggcctctgccgtgactcccacgccccaagcgtggattggcagacaaaatggcatttctgggctgcttcccacgccccaggcgtggcctcccacgctccaggcgtggcactccagtgaaaatcaactttctggagcacttcccacgctccaggcgtggccttccacgctccaggcgtggcatgcagaatttggctatgtacccccggtagtacataggcttgttggcgcagtaccttctgttctgcttaatccggcttaatctaatcttctaagcttgattatgatctaatctcaggcttaatcacatgtttaaactcccaggcattacaagaagcaacagactttgtggcattgaactgaagatagttcattttatcagcctctgtggagaaccacagatcaagcctatttgcaggttagggactagggggatttgaagaagattccccagctttcctcttagatgttctcactctcttaggggttgggttagacatgattacagaatgaaggttaggacacaaataggactcagaaatgacagaaaatgtagagagatagaagtagataaggtgcaaggaattttaggcttgtaatccactaattataggcactaatgatactccaaatcgttcattatttcaaaaatatagctgttggtgacattttaatgacatgcgatacgttttaaaacggattgggcagtttattttcccataaaaacctgtcagatttcattcaacagcatgaataatcgattatttcgttaagtaatcgattattccagagcaaatgagccactgaaataacacagtaatcgattatttctttctctattagaggttgaagacgaccagtaatcgattatattgtaaagtaatcgattatttgataacttttatgaattatacaggaaacagagcataagtaatcgattatcccgagtggtaatcgattattccagggagactatcacttctaatgttgaaggtaatcgattacaagtctttagtaatcgattattccagtgagacatgcattcatttagggaattttgatcaatgtaatcaattatcccgatgtgtaatcgattattccagagatagctgaattctggcaatatgagaataatcgattaccatatgtatgtaatcgattacatgagcacgtttttcatactgaatgtgatttttaataattttaatcgattaactcaaggtgtaatcgattgttacagtcaatttatcagatacagagcatttagcatcttttatgcaaggttctaatcaatcatacattcttgtgacatttggctttaattcatcacacaaaacacatatagaacaagctagtttatgttatttttatcaagaatacctagcatgtttctaagtgtataaaatctatcccttgataatggttttgtgaatatatcaacaagttggttattggtgtcaatgaattctacctttatgttacctttttgaacctgatccctgaggaaatgattgtctgatctcaatatgctttgtccttgaatgcattattggattctttgatatgtttatagaacttgtattgtcacataacagaggaatttcattcagttttactccataatcttgcatttgttgttttagccacaagctttgttcacaacaacttccagttgagatgtattcagcttcagcagtagataatgcaacacaagattgtttcttgcaatgccatgagattaatgaacttcctagaagatgacaagtgccacttgtgctttttctatctaacttgcaacctgcaaaatcagaatcagaatatccaataatattgatagaagcgcctttaggataccaaagaccaactctgggtgtagctttaagatatttgaggatccttttgacaacagtaagatgagactctttgggatttgcttgatatcttgcacataagcaaacactgagcattatatcaggtctattagctgtcaagtagagcaaggatccaatcattcctctgaacttagactcatcaaggatccactttcatctgaatcaagatatgttgatgtggccatgggagttgcagcatccttgcttttctccatctcaaatttcttaatgatttcaagacaatacttggattgattgagaaaggttccattcttcatttactttatttgaagtccaaggaagaatgttagttcacccatcattgacatctcaaattctttctgcatagctgaggaaaaatccttacacaataagtgataagtagaaccaaaaattatatcatccacataaacttgaaccaataagaaatcattgtcatgccttttgataaacaaggttttatcaacattgccccttgtaaaagattgttcaagcagaaatttgcttaacctttcatacccttgtctagtagcttgtttcaaaccataaagtgcctttttcagtttataaacatagtttggatgttcgaaaaaaccaggaggttgttctacatatatgtcctcctcaatgtatccattcaaaaatgcacttttaacatccatttgaaaaagtttgaaattcatgagacatgcatatgcaagtaataacctgattgcttccaatttagcaactggagcaaaagtttcttcatagtctatgccttcttcttgattatagcctttagccaccaatatagctttatttccgactatgattccactctcatcaagtttatttctaaaaactcattttgtgccaatgggtttaagagatgaaggtctaggaacaagttcccaaacttcattcctcttaaactgattgagctcatcatgcatggcatgcatccaatgttcatcattcaaggcttgatcaatgttcttaggttcaatttgtgaaacaaaagccatatcacaacataggttctttaatgaggatctagtagatactccatttgaaacttcacctatgatgttgtcaagtgataaatctcttgttgttctccaatctttaggtacttgaacagaggttgtggtttttgcttcagcacttggttcttcatttttggttgaggatttgtccaattcaataaattcttccaactgtaacacccctgtgcacccggtgtattaacattatatgattattatcagattagcgcttaatcactttaattgaaacatttgcggaagcataaatcgaaaaccatatttcttgattacattatgtatggaatataaaacatctccacacaacaacaacaacaacaacaactcaagcccttgctgatccagaatcacataacataaccataggcagataaccacaaattatctcaacagataaacaggaggaaacatcattacataacataaaatggttatgtacatatacatcatctgacactcgaagtgtctatacaaaagaataagcatccgagtgcttctgatctcacagatccttcctcacacgagggcatacatggcatgtataatacaaaagaagtacatatgtgcacacacacatcttccctttacaggggtaccaaacatcatcaaaatacatctgagcctcctagctctccctactgccacacggccaagcagaacctgtctctactggggcctctcgccctgagacagctcctttctgccagaagagtcacctgaaataacataagccccacacgggttgagatatacatgtcagtaagctcagggtccttggaggcatctcctccaccttggctcactttccatgacacaagtcatcaggcatcacaaacatactggtctcccggccgtcataacaatacaagcaagtcatctagctctaatgtaaggtggatccaatcaacaccaaacctcagtgtgagaccggaacacacacccatgccatcccatcgggagctaccccttacgcatggacgcacgtatatggtacctacgagaataggcaatcaactgcgatgggacacacctatctcttggttttaagggatcatcatcacccacgagcaaaccaaactaggagatgcgctattctcctagggaggtccatatctatctaactggccagaagatctatcaataggcatcatacatgttcaagcacagatgcaacatacatatcattatgaggatgcaacaaccaacaatgaatgcatcatgaatgcaaccatcactccttcggagtgtggtggagcacaagcaatgggaaacatccccaagggaccaagaacttacctggcaaagccgagctctgcagttctttccctgctctgtggcccacgccactgacaccctcggtgtcaagccctaaacaaggcatacaagctcatatcaacatcaagcaatcaaataagcacaagcatatagcatggttctcaaccgtctcaatgaaaggtacctcattcctttccaaaacccctaagtcctctaacttaaggtttatcagagtccatcgattcatttaccacatatagaccctctgtggtctagcttgacctagccaaagcactagagtcttcacaagactcggtaaaagccaacaaaaagagctctaagctctatacagaccatagctcaagaatcctcattgtggcttgaacggttcttcacatacacaagacaccgttccaacagcctctcgagcacaacaaagccatataccaaggctcttgcatgtcacaacatagccaagcaactcagcatactaatatacatgcatcacatagagccaagaaaaatcaaagttcaccaaactaacatttgagagctaatccttcatccttacaacattctaaacacatgtttctaaaggacccaaggctaatactagctctatcacaagtgggtcactattcacccaaaaccccaactcataaatcaagcagtgaatcttgagtttcttacctcaatgacgacaaggaaggcccaaggacgactcccccaagctcgggtgtccacgaatcgttgccgttcctcgccgaactcgagttctacaaacttcccttgagaattggattctcaaatttggggtttctaagggaaattgatgaaggactcaagctcaccaattgttttccaacaagattgaggttcaaaggaagtgatttgatgaactaaggtgaaggaatgaagctcagaccttcaacaatggaggaagggtgctcagaggaagaagaaacaacttttgccctttcaaaaccgcgttgatcgcgccactctggcactgattgcaccagctcccagaactcatcgcaccaaccgcgccactcctgcgccaacctccaaaaccaatggcgccatccgcgccaacccggcgcgccactcgcgccccttgcaaagaagagcaggacctctggatggtctgccgccactcgcgccaacctggcgccactggcgtcaacctccagagtttctggcgccaatcgtgccaacctggcgccattggcgtcaggctccaatgtatatggcgccacccgcgctacttttccatctaccagtgtgcatggcgctgatcgcgccacacctctgcactggttttctgcagaagaaccctggcgctacccgcgtgagatcccgtgccatccgcgccaggactcagggtcattataccaactgtcctgcatcaccatcaatctctttttcctccttagagggactagtttcatcacagatcatatgtataaattcttcaatgcacatttttcttttattgaatactctatatgccttgctatgtaatgaatatccaaggaaaattgcttcatctgccttagcatcaaatttcccaagtgattctttcccattgttcaatacaaaacacttgctgccaaatattcttaaatgagaaatgttaggctttcttcctttgtatagctcataaggggttttctttaaaataggccttataagtaatctattcaaagtataacacacaatgcttacagcatcagcccaaaaatacttaggcaaatttgactcattaagaagtgttctagctccttcctcaagagatctatttttcctctccacaacaccgttttgttggggtgttcttggagctgaaaaattgtgattaattccattttcctcacagaatttttcaaaatgttcattttggaattcaccaccatgatcacttcttatagagacaattttacaacctttttcattttgagtaagcttgaccatttttctaaaagcaaggaaagcatcactcttggatttcaaaaacagagtccatgtgtatctagagtaatcatccacaatcacaagtccataataatttccacctaaactcattgttctagaaggatcaaacaaatcaatatgaagtagttcaagtggtctagaggtggaaacaatgtttttactttgaaaagagttctttgtttgtttccccttttgacaagcatcacaaagtttgtccttctcaaacttgagtttgggtaatccaattactaaatcttttctaatgagcttgttcatgtgatgcatgtgtttatgtgacttgctcttctatgccatagccaagattcatcaacattgattataagacaagaagatttatggaagagtgcatgatcaattgaaaaaaacatatgtattaccttttcttttacctatatacagaacctcaccacttttatcatctaaaattatgcagcattctttgttgaaattaactttaaagcctttgtcacacagctgactaatgctcaataaattgtgctttaaaccatccacatacagcacattttttatctttgctttgaagttgtctccaatattaccttcgccaataatcttccctttattgttatctctataggtgacatatcctccttctttgagagttaaatttgaaagtagggacatgtatccagtcatatgtctagagcatccactgtcaagataccaagttgatgttctaactcttagacacacctgcaaaattcaaattagatttcaagggaaggtacccaatttaagttgggtccatagggcttagcatttttctttcttttgagaatccaaatgcaatcaccattaggcacatagaatctcctagcataacatttaaatgatgtgtgccccttttccatacaatagttgcaagtgatagattttgaggtttttctaaatccataattttgattgactcttgagttcttttgccacttttgattcttctgttttggaggtacaaaaactatttttccaaatgattttgagccatgtttataccccaaaccagaagtatctccagcatatttttgcacacttaacatttcagccaagttgcattttcccttgtaaaactttctcaagagatcaattaaatcactgtttttggctaaaagcaacgtatatttttcaccttgactttgtttatactcatcaaaatccttttgaagcaatttatacttgtcaacatttctagaggaagaagcacacacacatccattcaatttgtaacttgaaacaagtttttcattttcttatttcaagttgcaaatctcattttgcaaatcagtaattttttcaatatgccatctaagatttcctctgagcttattattggattttgcaagtttttgggcttcctcatgcatttcttgaaaagcatgaatagcttgatcaagttcagaatttacctcatcttcatcacagcaaatcatcatcatcttcattgatggtggaagtgagacacatgttagcttcttcatttctgtggaagaatatgaagttgttgactcattatcttcccaagttatgtatgctcttttagctttcccctcctttttcatcttgctctctccttgttgtttcctcaagtagattgagcactcagatttgatatggcttggcttgccacactcaaaacatgtgaaattgttgtcaatcttcttgttgaggttgttgttgttgttgctgttcttactacctttgttgaactttttgttctttttcagaaatttgctgaattttctaaccaccaagttcacattatcttcatcatcctcttcacttgtttcctcttctttttcagcttttaaagttgcagctttcaagaaaatgcttcttgtcttcttttctgcatcttcacaagatgttagttgagacatttcaagttcatattcaagaagcttaccaaataatgcaaccatagagatctttcatagatccttggactccttgattgttgtaacctttggttgccaaggtcttgtcaaacacttccatatcttgatgtttaattcttctgtgtcaaagacctttccaagacccaaaagatgatttacaatatgagtaaatctggtctgcagttgagaaatgctctcattagtgttcatcttgaacatttcatactcatggatcaaagcatgcttcattgatcttctcacttcctcagttccttcatgagtaatctcaagcatctcccacatttcttttgcactattacatctcatagtcctgaaaaattcatcagaggaaagtgcagaggtgatcatatttttggctttaaaatcatattgtgcagccctttgttcagcctcagtcatctcatcccattctttgggatccaattcattttccacagttttctttggaataaaaggacccttcactattgcattccatgctcctgggtcatttgattgaataaagattttcattctatttttccaaaaactgaagtgttccccttcaaacataggaggtctgtttaaagaagcaccctctttaaaggttatttgtgaagtattcatctttctttttgaaaagaaaaagtgatcttgagtaactttcaaaaaccagctcttgatgccaattgaaaatgataggaatacttcaatacaaccaagagggggggtgaattggttgaaccttggtatttaaaaattttcaaatcagagtttccacaatatctttatcacttttaaaaatcgttttgaaaccaagaatcttatattcaatcaaattcctcagtcaagaaaatcaatagacaactgaaatctttctgtgcaaataatttgattcataaccaaagctataaagagatgaagagattagaatcaagatcagccacaatttttatactggttcagttcaaacactatgaagctacatccagttcttccactcaacactagaatggagttccactattgcaaatatatgttcttacaagatataacaagcctctctttatcaaccctagataaagttcagaaatctaaaacactattagattcttagagaccaaccccactgagaacactacttagcaacccctagagaaacactatctctagtcatcatgcaagaaacccatttacaataagtcaatctttacagaaatcaaataacagatttacaaccacaaataataaggaacaaattcacctgataatccaatgaacaagatgtatatgtatgattcaccaggttgaaagaaagaataacagattcaatgcttctctttccttactctttgaaactctattatgcttcactcttcaaatcaaaaacccatatgaattttgatgaagccaagatgttttagaactcagaaaactcactaatgaaagctcatgaatgtttgtgattgcccagaatacgaatttctcaactcttaaaatcacatggcaataggttctatttattgttgcgcgacggcacaaatacggcaagtgcaccgctcgtttcaagtaataatcgggtaagtaagtatcgttctccacagggattgatgtgaaatttacaataattataagtctcagcaattggaaaaaaaaagaaaagaaaatgtttttaaagaattgattgttgagtggtttaatgttgaatttaaaaacagaaattaaattgcagtaaaatggtttaagttgttaccaatggaatgaataattgtggtcaagcacaatcccctttgttccctacctctttcacttaactggttattaagtttgatttcttctatttactcagagaataaatctttcctagtttagttaacccctaatcccttagcgaattaaccctttaacctgaattgaaaacctaatcccttagtgaattctatcaagttaagcatttaaaagaatctattataaggttttgcagtcacgcatccctatccctaggtaatgaacaattgttatcttactcagttcagaaattagaaccccaacatccctattgctaatcctaatcctaagtacttaagtagaatggtcaattctaattaagaataaaacaatgaacaacagagtaaaataaagcaaacataaagaattctcattcaataccagtcaagttacagaggaagttacatcggttcttggcttaaccacaatacagaaattagcctgccataggcttcaagaacacaaaagctgttgaataatacatgattttgctgcaaccctagccttgattcttgatttccaaaggtttagaatgatgtttacaatgtgtaaaagatgtttttcttcatcccagaggttcctatttataattgccttcaagatagattaattctggtaacaaaggctttttcctgtgcaaatttcgaaacagataagtttaattcaggaaagaaaatcaatttcacactgatggcgctgatagcgtgggactccacgataatcgcatgaaatccacacaaggaagggttgattctggcttgtggcgcgactcgcgtggcctatggcacggatagcgcacctcttgcggcttcctggcgctaatggcgtgaacctctacgctgatagcatggagccttcgaaactggggccttcaattttgttttcttcttctttttgcttgaacttcctctttttaaccctgaaatcacaaattggtagtgaaatgagattaattggaatataaacaataaattaacttattctattctattttcctaactatttaattaaattataacctaaaactagcctaaaactaagatgtgtttgcaacacataatttataatagctttttaactgaaaataattgattaaacaagctcctgtaatcgattatttcgcatatgtaattgattaatttaagaatgtaatcgattaaagtgtttatgatgcattctaggtttgagctatgaacattataatcgattattccgtcatgtaatcgattaaatcagacacttatgattttccaaatgcactgagtaatcgattactgaattcggtaatcgattaagacagacagaccaatattttcaaatgcactatgtaatcgattaaaacgatatgcaatcgattaaatcagcagaacatgttagccatagacatgatatgtaattaattacgaacttttgtaatcgatcaagacagacagtatgatatttcaattttagcctaggtaatcgattaattcgatatgtaatcgattacattgttcttggtttgtttttcagaaggcacgaagaacaaaataatcgatgccaacatatctgtaatcgattaaagtaggaaaacttcatttttccaaaaacttgattttaatttgccttatttgttaaatgctttcaaattggtcctcattctatcaatcctaaatgaatgattatgcatgatatgcacattggattatcaaataacacatcttcccttttacatgaatcaattgatcttcaagcttccaaggcactttgcaatgaggcatgttgaaagcacaaaactccaaagcttgattccatgtccatcctttcatatctcctcttgaatcaaattaataaatatttaacacgtatataatattaaaaataaactaaaactacatataatttagatttttgttatatataagatgcacctttggtttcttttgcaagaaaggtgagagaaagtgagggtgggaagtaagagaatgaatgaaagaaatgatgaatgaacattatctctcacaaaacctacgttgcatgagcctaaaaaaattataagaaatagtaacctccaacatgcaaggaatgaaataaataattgaatgaatagtatctctcacaaagccaactttgcatgtgcttaaaaaaattaaaaattgaaagaaacaaatcctgaagtatgttactccaattgccactcaatccttcaaccccgtctctttagttttttttattctttatatcgattttcctcaccattcttccaattgggttcaattttgttgttcgaaatttcttctggaaagttctcagctatatgttgttttggttgattcatagttatcactcttctactctcagtcaaagagtaaagtctcactttaagtgatagtttaattttttaaattttaatgtttattttcaggtaaaaaactttagaggagcttgaaggctaattgcaattgtgtagtttgaccaaattttcttatatgtgaagagtgatagcatcgtaagtggaactaccttttatattattgattttggtttatgacgtaatgtgaaaacaactaacataaccaaatcgttattttgccagtattttataaagtggttatttttatcctattttgttttttccatttttgtcttttaaatatacatttacttaaagctcatttgggcttacaagtgggctgattgacttaaaaaaataaaaagtagttcgatgaaaagaaaactgaaagacaaagaggacatgaaggtaagtgtgatgtttagtatggattttattctctcttttcatggttgattgattttgactactggagttagattcggcgttgcaggagaggtctatgtgctaagcaaaacatggataggctattgcttattatgattttctcgaatgaagagtattattgtttactttatattactttagggctttcattttgcaaaacaagtttgggtgcaagaggactgtttggttttgaaaaaattatctgatatctaaaggtaagtatttgtttacgttttttttttaactgttgaaaggaaaatatggtttatagtttgttgtattaatttcatataatgaatacaaaaacaatatcaacaacactgtaaccataataggatttacaacaaacatctaactaaatttgcaaacttttatcataaattttgcatgttatttactatgcattttggttgaaggcaatcttatattcatttatcaaactaattatctaggccttcaatcatattattttatagctattcatttatttgccaaaacaaataatgcaccaacaaatttcgcttactaattgtgaattattcagtaaccatgcctacttcacaaccatcaatgacaataaattgaacatgagtttctactattttagtttaatttttacttatttaactttttattaaacaatcattaaattctttgtttttctaattattgtttaggattgtggattcttatccatgtatttagttaccaaatattttgctatatcttaacttaatagctcacacaataattgactataaaacattatttaatacttcacttttatagtatattatcatcttataaataatacttattatcataaccttaacaataacattatctaattaaccaaatctaaaatctaacagatcacatttgccagtgcttaagcatggtttctaaactattatatttttaaagaaatataaatgtatctattattccctcttattttagtcttctaatttattattaagtttgaagttgattttctaatttttaaatcgattcaacttgatatttcattaattttaaaaaatgacactttgtgacagttaaaatatgtgactaagtgattttaaactatcacaaaatatataattttttcaaaaaaatgaatcattttgaaaaattaaatgaccaaatagaacctaaaaaaactaaaggaacaaattgaatctattttaaaaattaaaggatcaagttaaaccaaaaaatacattaacaaactaaatctaaaaaagaaattaaaagaaattaaaaactaatttaaccttatcaatttaaatgtttttgtaaaaaaatttcttaattatattttcgtaaaaaccaatgtccaaaacctctacttaatttatggaatttataaaagtattagtaatatattttaatacattcgttttaacctacctccaattgtgatacatcttgtacaacattggatatattaataaagtttgttttgctaataaataaaatacattttttaactcactctttattaccaattaaaattataaaattgtaagtgagatttaacaaataaaaatagaaattataaagttttataattttcaataaaatttaatcaataacaaaattctattgaaaaatatatcataaagtatataaacatatttgtcttacctttaagcttggttggtaaggggatacatcatttaatatcctgttttaatctagaaagtctttgaatgataagtcttaaacctataaattcgctattataatataatcaagacactattataccaaggaaaagtaggaaaaaacacacacaaaaaaaaggaaattaaaatgagataagtcattccacttttctatataccccaatgataggaagccatagcttgcgccattgggtgagagtcgtgctacaccttaactccttccaagtcaatgtttaaggtgtatatattaatttatcaagtaaaatataattttcatctcccaatttttataaattttcaattttagatttcttattttttaattagtatattttgtgttccacttttaaaatattcatgattttagtatcttgattttttaattgagatatttcattcttcattttcaaaaaatttataattttagtctcatttgtcaatttaggcttaattatgtatttttttataaattaagcttcttagcaattaagtaaactttttaaaaaatatttgtcatggggataataaatacacacatgctaatcaatgtttacataatgcataaatcaatgtttgaaattgactttaagtactaaaattgtaaatattttaaaagtagagaataaaatatcttaataaaaaaatgtgaaactaaaatcacaaatttttaaacaataaagatgaaatatctcattaaagaataaggagattcaaaatcaggaatttgataaagtagatgacaaaaattacattttagtctataacttattaggaagaaatgctagcttccaacacctttcatattcaattaacaaatgacaactgtcaaatttttattataaatattcattgaattaatattttaaagtatttttcttttccaatttatcatttggatcacatgaattatgaggttaaacgatacaaatgggattttttttcaaaattatcaaatgggagaaaaatttactctgaatttattaaaaagatacaaaactgttacattgatctgatatttatagaaatattctgtaactaacttttatttttttgtaaattttaaatttattttactctgaattttaataaacttaaaaaagacaagaatacaattcctaaagaagtaaatattaggtttaaaattcgttaaaacaaattatattttttttttttgaaaaaaaaagtataattattttagcatataagtcaataacataaggggaaaattacatgtttttgtaaaaggttgaaaaaaatatactaaattaatttttgaataaaaaatttgccaaaatttttaaaatttaattgtttaaagtataattaggctaaaaaatactatataaaaatagaataatgtgaatcatccttaaaattatataacttaaatctatataatttaatgcaaaattgaatcttgaatattttaatttaataataaaataatttacaaacttacaatgtgacatagttgttgaagtttttataaactaaataatttgtttgttattttaaggattaaactacgatagattataataactttttatatttaataattagtataattgttagaagcaaaaaattccaaaaccttaccgttcaaactttggaagaatggcggtgattatagccattttttcgagccaaattttttatctttccatccatttaaatacccttctccttctcctgtaggcaaaattcttgtacggtaaatcacacatcttttcttggtggaaagcagaatgtggaggcaagtgaatgttagaaacagcgatgagtcgttggggagaacgagcaagatcactttggttcttgtcgcctccatggttgataagtacctctgcgacaatgacttgtcgaacacgcattacacctttcgcaacgaggaatcttctctctttctcagttcatcactcaatcaggtttttcgacactatattttgcaacctttttagactggctttctttcatgacactctcggccataagctgtattatgtgttttcgctaggtctcctgaccccaatttatttaattgtttctttttaggatccgaaggatttgttgactttggcggcgatgcttgacgagtatatatttttgaagaaacaaaatgtgatactgactcaaggaaggttcaccgtgatgcaagagagaaagaggattgaaatcttttggcaaggcatgcagaatgccctgaacgcttacaatgcttttcagaggccacccccaccgaacgtcgcggcgacgaatgcaaattttgcagaagtttctccaccaagggtttgtgacagaactcctatcgaagtagtaattgcatttctcctatcgaagcagatacaggcaaggcaagtgagaaggatgatgtaaggagcaaactgaactttgatgcctctaatatgcctaagagcttggacaaatcattggctaatgaggtttctacatctgagtcggacaaggaagttgacatatctgacatcgatttttcaaacttggactggccactcccaggaatcagtgacgaagatttttctttttacgatctaggtccaaccgattccaacgatattgcttcaagttcaaggtattttttctatttaatgttgcaattccttctttgttatttaatgcttgtatctgacattctttgtatctttatttaataggtcttctcatgaactgcaagtaagcacagataaatatttgaatatacaaggtaatcaaggtcattgtgtattcttcataattttgatctaatctactggttactgagttttttttttctttttttttctttttaacgttgtaggccttgatagtcaacatgtctcactgtgataaaatctgaaacaaagtggacctgcagttgcccttaatttgggatatcaaacaccattaatttgttccttagcctctttgcttgtcagtaaacttaggtaaggctaaaatgattaatcttttagtgattgtagatgactttagcccatgttgtttcttgtttacttgaaccaaaaaggaataagttacagaaaaggaattcatttgaattgaaagacttcatccgaagtaacaaatattgttggttgggtagaaaattattccatgccagatcacaattgactgatttgatgttagcagttactaatcactataatggaaaagtttgactatttttgtttgtcatttccactaattatattttcactgttcttatgcaggcagtacaactgagtatttgaacttagcagttaacaaaggtttatgttagggtaaatggatccaatgcagctggtaatttgttatgtgcctctgataacattcatcaattaaacaattggtttggcgtgggatggtataactaagcattgaagtgtaaagccttcacatagttgtgtttctattttgtcttgagaatagagctagaattgactttcttcaagtttggcttgattactagttattgtaatggaataatatcagctgagtttcattattttaatttgtcatttccacttagtatattttcatcacttaatacaacacagaattttgaagttacttgtcaacaatatttataactttatgttttcttttttaattggcaaaaagaatatatatatatatatatatatatatatattataaaaatggtaccggagatacctacgacatgatacaattaatcagccagggatcagcttacataggggttatagaatatttataacttaacagctacaaatactcaataacccacgaaacagacccaccatcaatagtaattacacaagcctaataaaaaagatacttccatcctaatgaaatccacctctgttaagctttgcaccgcatacaccagtaacaaaactgcagaatttgaattacaaagtacactgcatcataccaatgacatgcagttgtgttactcatccactgaacaaaagagaagtgaaatgccggagtcgaattgcttaagccaagaccatgatacaaaagtgatatcatcaattaaacttctgctatcaatctattgttgattaaagataactgcatttctctttttccagacgcagaacactgccgagcaccaaatagtctgccaccacaccttgctagagcctgctgaacccatattagtgttttgccaaaatagatcatcaataaataagggcagtactgtggcaaaaccacctatattagtgtttagcatttgggggtgccttagtatgccatagtagacaaaaaaatatccttcttcacttgcggtctatttacaagagatacattgatataattgatataattgttgaagttgtacacgttcaataaattgatataatttttggacttgctctttttcccactcaaaacactctcagtttccacctccacccactctccaatattgttaataagaccatctttgtgttcggattagataaataacctaggaaataaattaattaattttgatagccaccaccttagggatttaaaaaaaaaaaaaagagagagagagatggataagacaatactgaattcaccaagcaaactcttcccgcaaaggagatgaatttgtgcttccaaagagctagcttgttggagaattttttgatgataggctcccaaatttgttgtttcttatatgtttaggggaatgaattcagtgtaatcatgcactcacacgatcagtaattaataaactatgtgataaacatcatgattaagagatatcaaaatgtgtttaaatctgatttattacataacacataataaccttggctaaaaaaaaaaatttactgtagcagttactgtaacttggcgctgatagcgtggtatctggcgctgatagcgtggcactatagcagaaagccatttttcacatttttctagcgccagagtgcgctaggagcgccacagatgctggattttggcgccaggagctccaggatggcgccaagggcgccaaatacactggattttggcgtcatcagcgccagagtggcgtcaggagcgccaccgttgctgaaaactggcgtcaggagcgccaaagtggagccaagggcgccagatgcactggatattggtgccaagagcgccaaagtggcgccaagggtgcggcatgtcggtcaggccacctataaaaggccaaatcgcgatttttccagaggaaaccattgttccttttcctccttgaccccaggtagccattagagcaccttagaagcttcatatctccattataaaccattaaaacacctcctaatcacctttaaacctgattagaaccaagtgagagccaaatctccagcttagagtgagagaattcccatttcttggagtttcttcagagagtggaattgtggagaggaaaggagctggttttgggacaccagagttgggagaaaggcttctccaactttcctttattgatttgaggtaagaaactcacattttaaccgtttaatttgtgaaatggggatgggatgaatagtaaccatatgtggatagggctggaattaggcttaggttcttttgggagatgtagtcaggaggttgttctgagccatatggcatgttgaaactgaaattgggatgaagtttgagtttggctctgggaagggagaagtgtgtgtgaatgagcaatgttatggcctgaatttacttaagtacctttacaaaagttattcataaggccaaataatcggtaaaaatgtgattatatatgtgttttggctgagttgaaccaatgtgggttcttaattctggtacagctttaaattgagttgtacagagttctaaaggaactctgaggccttggtgagactgaagcagaccattgagggtcaatgtatagcctagtagaagctgggctaagataaacctaaagttagaggactttgaattggttattagaggaagggtatttccttccatataaacggttgaacaccgtttctaattgtttgattcatgcctactgtaggacgtgacgtgcatactgctggtagagatcaccaagagactaggggagctgattctaagctacgaccaagtaagctcagtgttttcagtgattgtttccctgcttgtgtttcactgcaccctacatggatgattgcttgatatgacttgtattctgatgtgttatgatgttgtggtactgaattgtactgattattgatgaaatggtttgatgatggttggcaactgcatgctagctaaaccctgagatggggtgtattgattttgattacactgagttagtgtatattatgttacttatgatgattatattgaatacactagtatagtgtatggttgcatgaactttgttttgagctgattgtgatgtgattgcttgaaatctactggccagtaggattaggtactatggaccccttgggaatgtgcccttaagtggatgatctcccctaggataatccatagccgtccatgtaaaccctgagtagatgtgcctttaagtagatgatcctattcaggtattgggcggcaagtcctggtagatgtgcctttcagtagatgatcctacctgggcatgtgttgagcgagtcctgaatagatgtgtccttcagtggatgatcctattcaggcaatgtgtgttgattatatatgcttgtattgtgttgttatttgcatgtgacaaattttggtcagccgagaaggctgttgatctgatgagaattctgtttaattatgagatctatatatatatatatatatatatatatgtatatatgttgtgatattgggaagtgaaccaaggggagggaaacctctgaaaaccctgagtttacggagataattatctcaccccggtttggggattatgttgcaggaacagaggctgcagttactaagagatcccagggtaagaggcctgagctgggatagagtgaagaaaaccctaggcttagatgaccgagcttgttagctcagattttgtcattttatctgtattttgaatcctagggaacatttgtatagttttgagaattatgtaccatgtatattacagagattcaccacatatgtataaaagtgtatattatacttgattcaagcttccttaaatgtttatttccatgcttgctgcgttgttgtgatattgtataatgataatacgccgggtgcacacggggtgttacataacatgagtgacttgatcttcatctaatggtctgaattgcctactacatacaaatgctgattgcagacaatgaagagagttagtcagagaattttgttttgttttaatttatagtttataataaaacaaaatattataatggttgaggatgtatagttatctaaaaaccttagattggattctcttaatttgatttttcttttccattttgtgattctaatcacttgaactttggaatagaaatgccataacatgaggggtctttctattctttttggcttcattttcattaggctttgttctcataaccattgttttgaatctaagacaaggcggatccaatcgaatgcttcttaaaaaccagcacaaaatcattaaaccggtcaaaaatcgttaaacccggtggttaattggtttaaatgatttcgcttaaaacaatttttttcaaactagttgaattaattgaaaaccgataaaaccaatggttaattggtttaacctgtttcacttaaaatatttttttttttgttttactttcaaaacgacattgttttgattttaaaaaaatgttataacttctaacatttttaagggaaatttgttttttattattatccatttatgcatattatgttttatttatttaatattattaggatattatattaaatattaaaaaatatattttattaaaaccaaatcgacttaaactattgacccttttctgttccagtttgataatcagtccagttctaaaaatattgcttataactcccttttacagtacaagaaactgggccatttgggtgcaagaaggagaagcttttgctttttttcaagcattggtgttgattgctgaatcgggattccaatctgttatttttgagactgaatgcaagcggctggtagaccacattcttttgtactgatcagaatttttttgaatgtggcattcttattgatcatatacgagatattcttggaatttagcccgacttcaaaattcagtttcttacgacatctgttattaatcctagccatcatattttttcttgtattccacaatattaatgtatttccaattatgttgaaatggaattgaattaagtttgctacggcaaaaaaagaaaaaaaaaacttgggccatttgaagccctcttcctctatatgcatacacattaaaatgttgaagaatggaaagaattgttttaatatgcttttctagaagcaattataggagaagaaaataaaaagaaaaaaatgaatttagtttcttcacaaattaaaattaactcatcattagttaattgttagccaatttgtaaatatcttctaatttttaaggtgggtttggttgtgaagaaattggtgagaagaaaagaattttttttaaaaaaatagcacggatctctattttatttcaaatatttcttttcaattctctttcttttctctcttttataataccaaacacgcaaatgagataagctttataaatcagttaataattaactaatggaaaattaattttaacctataaaaaactcatttatttttaaaattttcttctcttattagtgcttttatggtgtgtttaatagagaagaaagaaataatattatagaaaactaatttgttttagactcacttcttttacactctaactttaattaaaaaaaatatatttttatcctttaaatcaagcacaccattaaagaagattatccggtgaagtagctgtagctgccattccagcatctcattagaaaaccattatctaagcttgtgtgaaagatttgttcatgcaagtaatgttttcttactagaatggccagtgtggtgtctgtcaaggattaatagagtcacaacttgataggtattctctttattatatatatagatataatattatgaatattaaacaacaaaagctggattagcccagttggttagaatgtgaccttaactataaatgggaggttcaagccctccttctaagcccaaaattacgcatagacaatggtattaattatgtacacaggatttcaaaaagactctaaaccactggtgatataataattcctcccttatttacttaacaactatataaaaacttagtgatttgtagcaacaaatgttaacaattttcttagtttctattttcttggttgattttgttttgccctaattactttctttgtttttttctcctttatcaatatttctctaatattgtcaatatgaactaaatttgttaaaagtgtttatttgatatggcctatcggttaaagtattttgtggaaaagatactaatcggatctttataagaacatatggaaattagagaatttcttaattatttatttgattttgttctatactgatttttggtttgcaaattatgtgtttgaccaaatgtcaaaatgacatttttgtgtatgtttccttatttatcatttggaagcttttcagttgattatgtcggtttgatattatcttatagagagaaatgaagatattacttgggtaaattgaaagagaagagctaaacaagttagaagtttactagcataacattaattttacatatttccgttgttttctttaattttagttcatagctaaaaatattttttctaataacaaatgatgtaattttgaagtcctactttttttttgtctatataatatatatatatatatatatatatatatatatacaccaaattcattttcaactaattatgacgtacatgacagttttttcgactccattgtacacaaattctcttatattataaatactacataatttatcttgcttttgggaccacttcatctatctactatttactctattaataaaaataatctcatttatcatgttctctgagtttaggtttcacaagcttattttgttctttatatttcacaatctttcgtcaggactaggttgaatagagttgtcatgggaacaaaagtcttaatgaataacaaaatttaatgaaaaaatctaccttagtaccaagcataatgacatagagtatactagtgttgttcatttcctgattatggttataagtgccatgaaagaaattgaaataaacaacattcatgtatgcttagacaagcttctcagtcatttccacatttgccttcacatgtttctctacttaggttgctcaattttatgttataactatattaaactacttataaaaataactttatattattattccaatatatattttcttatcaatgactttctttacttttgcaactcatcacaattcttaacaacatgtccaaacacatttttcagagctccactatcctttaattatttacaatttcaaaataatagctactcatacaaatatgttggatttaacatatttatatgtataaatttgtaacaatataataaacatataatataagacactagaataacttttgtaattttttaataacatttccaatcattattcataaaaatctacattatttaatagactttattttgcactgttgccttctccaccaactctttcatgctataataactaatgctaaggcgccattagcgccagagtctctggttcctagcgcgattagtgccagtgagacacgtcagaggccatttttctctagaattcggttctaatagcgccaggaatggcgccgttaaagcgggacgctggctgggtcacttaaaaagaccttttctatctcatttgtgagccaaaacctttactctcttcttccttctccgttttccaccattaacaagcttggagaacttcaaatctactcaaccattgaccaaaacacttcacttccaacatgaaagttaaagggaactactgaatgagctaaattccatcatcagtttcccttgaaaaccatcaagcggagagatcattttctctagggaacttcacaatgtttgagtttggaagggaaatgagtcgttttaaggacattcaagcttggagaagttgtcatctagccttccttgtcgttttagatgtaagaaacacaaattttactaattatttaagaatttgttcttgagatgaatagtgacccatttgagttagagctaaaattaggtttggatcctttgcaaaagtatgcttaggaggttgttgtgatgaaggattagccttaaaatataatttttatggactttgaaatttgactctaaagaatgtatgtgtaggaagaatgttggctaaattaatgatattatggtatgtatgaaccctagtgctttcacacgatgtgtttaggagactatataaacggtgaaaatgtgttgaagtaaccattttagtcatcttgttagtcattgaaatatggcatggatatagtattgaactctttgaattggattatgcagagtcttaaggagactctagtgccttgggttaggccgagatagatcctattgggggtctgtaagtcactaattatgtgactagttcttataacttggaaatagagggaaaagaggttaaatggaaaagaatagtgtttgttttcattctaacggttgagaaccgttattgattgtttgtttgcctttatgtagggcgtgacacaaaggttattggtggttgtgaccacgaggctgggagaaccggtgtagcaatgagagcatgtaagctctttgttcttaggagtgtttccccttgactgtgttccaccatactccgagggagtgattgttattatatgtcatgatgcatgtattttgaaattgtgtgttactacttttattgagaacatgtatgtgatatacactgtgataatttgttgtgtgattgatgagattctttggccagtagaatagactacttatggactccttttggaaatatgaccttacgtggatgatcttcccttgaaagtgccatggatgttcgagtaagtcatgagagaatgtctccttaaatggataatctttcttaggcattgacatgaagtcctgacggaatgtgcccttaagtggatgatcttcctcaagcaatgtgcgtagagtcctgagagaatgtgcccttaagtggatgatctttctcaggcaatggtgtgaaaagtcatgagaaaatgtgcccttcaatggatgatctttctcaggcaatgttatatgtatctatatttgctatatttgtgttgcattcctgatgttggtagtgcccaactgaatgacacctatgttgtgatatacatgtgatgtgttttatgagagccgtgatggctagattgtgtgtgttgccaattttgatactatatgtcatgggagtgaactaggggaggagaggcctccaagaacccttagtttactgagattgtatctcactccgtgtggggattatattttttcaggtgatactcagcgagtgaatggtggatcccaggacaagaggtccgagtagggatatggttctgtgtgaaccataaacatatattttgagagcatattggctcatttctgtcgttatgcctgtatttgtacccctgaggtaaggattctcaatggatttgtttttgtatgtgttgtttatctaaaagataccgatatatgtgaaaggacagggtatatgatatcttattttgtacagtcataactgagatatatgaatatgacttatttggtcctctagttgtatgatgcgtgtaattaccatacataatgtaaatataataaccatgaaaaaaaaatttactatattcagtcacaaaaagcattagcgatggaattagcaacgaattttgcgacggatttagcgacggccagagagtggcgccgttagcatgggaagtgcaccagagtggcgccgttagcgccagaatgcacttggaggctctttttctcgaatatctggcgcggttagcgccagagtggcacgattagctccgggaatacgtctagactcgaatatttggcgaaaatagcgtcaaaatgacactattagcgtgggaacacgagctgggggttataataggcgatttttacgaaatttcaggccaaaagcttcattctctccttcctcaggccttttctgccattaatgatgtaggaagcttcatatctactccattcttcatctaaacactttccacccaactataaagttgtttagaacttctccatgagctagattccagcttcagttcctcgagagaaccatcaatcggagagatcgtgttctctagggagctttgtaaaacttagttttggaagggaaagaaggcgattcaaggacgctaaagcttgaaggagtgatcctctagccttccttgacagtttagaggtaagaaactcaagttttaccgattgatttgtgaaattgttcttgggctgaacagtgacccatttgtgttagggctggaattaggcttgggtcctttaaaaaagtatgcccaggaagttgttctgatgaatattaaactttgaaacatgacttttgatgaagtttgattttgactctgaagtatgtatgagtaggaagaatgttaattaaatgaaaggtattatgataaatatgagcctaagtgtctttacaaaagttgttcagaaggctaaataaacggtgaaaatgtgttgaaataactgttttagtcaagttggataatcattgatatatggtctggttagagcattgaattgacttatgcagagtcttaaagcgattctagtacctttattaggccgagatatatcctagtgaggatctgtcagtcatcagttaagtgactagccttagagacttaagatagagtaataaagggttatatgtaacagaataatgtttatgttccttttaactgttgagaaacgttattgattgattctgatatgcctttatgtagggcgtgatacagagattactggtgagtgtgaccacgaggccgggagagccagtgtagcactcagaacaggtaagttctttgttcttgggagtgtttcccatggtctgtgttacaccatactccgagggagtgatggttaatatatatatcatgaggcatgtgtattgaaattgtgtgttactgttttattgaaacatgtataagatgtatatggattgatgatatacactgtgatagtgtggtgtgattgttgagattctctgtccagtagaatagattatatgtgatgtaagtcctgagggaatgtgtccttcagtggatgatcttcctcatacattgatataaagttttgagggaatgtgcccttcagtggatgatcttcctcaggcagtgttgaaagtcctgagggaatgtgtccttcagtggatgaccttcctcagacattattacatacatgtgatgtgctgtgatttatgagagtcgtgatggctagatgatgtaatgccaattttaatattatatgccatggaagtgaaccagggggagggaaagacctccaaggaccctgatgttgatttgagggggagctgaatgaagatcaagtgaagattcaagcaaggttcaagacttggatgttttggctttcaacatggctcaagctttgaagaaatgatatttttgatttaaatgtaaaaggactgaaagcatcgtgatgatccaagctttgattacatatcatttatatattatttaagcattgcatcatatagaagctaagtaattggtttgaaacttaggaaaaagctagatgttttctaaaagatagtatatagtcgttttaatcgattactggcttatcataatcgattattttgttcatgagctttctggaaaatcaaacataaacactttaatcgattattgcatcgacttaatcgattacttgaaatatcgcatacatagaaattggccttgtgactgctttaatcgattaccatgatattgtaatcgattacctacttagttgaaaaatactgtcactctggcttaatcgattaccacttactgtaatcgatcatttaagtacattcatgattttgcatcacgctgctttaatcgattaccaatggatgaaatcgattatccttcacaaacatgattttagcataggactgctttaatcgattacacatagatgtaatcgattacacttcattatcaggattttagcttagtctgctttaatcgattacaccacgggttaatcgattatttaacctgtttaatgaaatcctgagaataccaaaagacggtttaatcgattacaagagcgtctggagcgtttttaatcgattatttccgttacgaaaataactatatatataacacttgccttttgtaatcaaaaagtaacagagattgagattgaccttaaaacttttcgatattctgagctttctaaggaatcactaaggcattcttctgggttatttgagttttgcttccattaagtcattcatgggttactaatcttgttagtgaagcaaactactctttcacaaaggtttaggaaagctgttctgcataattggtttgcattcaacctgagtttttttcattcatatgtatttcaatcttggatcatcaagtgaattctttcctggctctttgtgggtgttaagttttctgcagtaactttgtattttgttgatcctattgtatttagtttttcttacaagaggagatagtgtttctccaagggagatagggtttctccaaggactgctgagtaggtttctcagtgtgggtttggcttctaaggatctaatagggttttagatctctgaacttcttctagggttgaggaagagaagcttgtaattgcttgtaagaaacatatttgctatagtggaactctactctagtgttgagtggaagaaactggatgtagcctcataggttttgaggttaaccagtataaatcttgtctcttgatttatattctgcagtttatatcatatcttgtgtgaattatatcttgtgtgttgtgaattcttctttgaaagttgattctttaggcataacaaatcttggattgattttggataaagttttcaattggttttgtgataaagatccaaagggcattaaactctgatttcaaactctaatattgttaaaagaaaattttattttaccaaggttaaccaattcacccccccctcttggttaagtgtgagtgttccttattttccacacctgagtttattgacattgttatctcacccccgttggggattacatgttttgcaggtgatgctcagggaacagatggtggatcccagggcaagaggtccgcgtagggataggttctgtgtgaaccttaggcatagattttgagaacttgttagctcatctattttgattatgcctgatattttgtactctgagagggatatgtacagtttatatatatatatatatatatatatatatatatatatatatatatatatatataaaaatcaatgttaatgaaccggatgcatacgggtcgttacagtaaagatgtattgttgatgacgtttgatgacgtcattttgtctattgcttttatattgattagttctaattaattgttgccattaacgatcattgttaatgaaccggatgtatacgattacacatgcgtccttcttttctcttactgatgagtttatgttgtcattctctatacgtgatccatccagcttttatgattttgtattatgaaaattgtgtgaagattctcatataattaataaaaggatttttcacttttttttattgtgttaggtccttgaagtgacaactggtttttttatattctactcttttactcatgtggccaactactgttacaacccaaaaaagtttagtggcatactttacttattttatctatttttatttaaaaaaagagtatatatacatgaaaattaataattaataatctatagagttgttataattatgatatatattaaataaataatttaaaaatagaaaaattattatattaaaaatatagaaataattaatcaaatttatagatattaacagtaagtaaaattaattaatatttgacacatatataatattaaaaataaactaaaactacatataatctatatttttgttatatataagatgcacctttggtttcttttgcaagaaaggtgagagagagtgagggtgggaagtaagagaatgaatgaaagaaatgatgaatgaacattatctctcacaaaaccaactttgcatgagcctacaaaaattataagaaatagtgacctccaacatgcaaggaatgaaataaataattgaatgaatagtatctctcacaaagccaacttcgcatgtgcctaaaaaaattaaaaattgaaagaaacgaatcctgaagtgcattactccaattgccactcaatccttcaaccccttctcttcagtttttttactctttatatggattttcctcaccattattccaattgggttcaattttgttgttcgaaatttcttcttgaaagttctcagctatatattgttttggttgattcatagttatcactcttctactctcagtcaaagagtaaagtctcactttaagtgatattttaattttttaaattttaatgtttattatcaggtaaaatactttcagaggagcttgaaggctaattgcaatagtgtagtttgaccaaattttcttatatgtgaagagtgatagcatgtaagcggaacttccttttttattattgattttggtttatgaggtaatgtgaaaaccactaacataacgaaatcgttattttgcccatattttgtaaagtggttatttttatcctattttattttttccatttttgtcttttaaatatatatttacttaaagctcatttgggcctacaagtgggccgattgacttaaaaaaaatacaaagtagttcgatgaaaagaaaactgaaagacaaagaggacatgaaggtaagtgtgatgtttactatggattttattctctcttttcatggttgattgattttgactacttgagttaggttcgacattgcaggggagatctatgtgcatagcagaacatggataggctattgcttattacgattttattgaatgaagagcattattgtttactttatattgctttagggctttcattttgcaaaacaagtttgggtgcaagagaactgtttgcttttgaaaaaataatctgatatctaaaggtaagtatttgtttacatttttttttaactattgaaaggaaaatacggtttatagtttgttgtattattttcatataatgaatacaaaaacaatatcaacaacacgtcaaccataataggatttccaacaaacatctaactaaatttgcaaacttttatcataaattttggatgttatatttactatgcattttggttgaaggcaatcttatattcatttatcaaactaattatctaggccttcaatcatattattttatagcgattcatttatttgccaaaacaattaatgcatcgaaagatttcgcttacaaattctgaattattcagtaaccatgcctacttcacaaccatcaatgacaataaattgaacatgaggttctactattttagtttaatttttacttatttaaatttttattaaacaatcattaaattctttgtttgtctaattattgtttaggatagtatattcttatccatgtatttagttaccaaatattttgctttatcttaaattaatatctcacacaataattgactataaaacattatttaatacttcacttttatagtatattatcatcttataaataatacttattatcagaaccttaataataactttatctaattaaccaaatctaaaatctaaccaatcacatttgcccgtgggtaagcgcggtttctaagctattatattttttaagaaatataaatgtatctattatttcctctaattttagtcttctaatttactattaagtttgaagttagttttttaatatttaaattgattgaatttgatatttaattaattataaaaaatgacattctgtggcagttaaaatatgtgactaagtgattttaaactatcacaaaatatatatttttaaaaagatgaatcattttgaaaaattaaatgatcaaatagaacctaaaaaaacaaaaggaacaaattgaatcaattttaaaaattaaaggatcaagttaaaccaaaaaatacattaacaaactaaatctaaaaaataaattaaaaaaaataaaaactaatgtaaccttattaatttaaatgtttttgtgaaaaaaaatcttaattattaaatttatggaatttataaaagtattagtaatatattttaatacattcgttttaacctacctccaattgtgatacatcttgtacaacattggatatattaataaagtttattttgctaataaataaaatacattttttaactcactctttattaccaattaaaattataaaattgtaagtgagatttaacaaataaaaatagaaactataaagttttattattttcaatgaaatttaatcaataacaaaattctattgaaaaatatatcataaagtatataaacatatttgtcttacctttaagcttggttggtaagtggatacatcatttaaaatcctatgttttaatctagaaagtctttgaataatgataagtcttaaacctagaaatttgctattataatataatcaagacactattataccaaggaaaagtaggaaaaaatacacacacaaaaaaaagaaaattaaaatgagataagtcattccacttttctatataccccaatgatagaaagccatagcttgcgccattgggtgggactagtgactgctacaccttaactccttccaagtcaatgtttaaggtgtatatattaatttatcaagtaaaatataattttcatctcccaatttttataaattttcaattttagatttcttattcttttaattaatatattttgtgttccacttttaaaatattcatgattttagtatcttgattttttaattgagatatttcattcttcattttcaaaaaatttataattttagtctcatttgtcaatttaggcttaattatgtattttttttttaaattaagcttcttagcaattaagtaaactttttaaaaaatatttttcatggggataataaatacacacatgctaatcaatgtttacataatgcataaatcaatgtttgaaattgactataagtactaaattgtaaatattttaaaagtagagaataaaatatcttaataaaaaaatgtgacactaaaatcacaaatttttaaacaataaagatgaaatatctcattaaagaataaggagattcaaaatcaggaatttgataaagtagatgacaaaaattacattttaatctaacttattaggaagaaatgctagcttccaacacctttcatattcaattaacaaatgacaactgtcaaatttttattataaatattcattgaattaatattttaaagtatttttcttttccaatttatcatttggatcacatgaattatgaggtgaaacgacacaaatggaatttttttttcaaaattatcaaatgggagaaaaatttactctgaatttattaaaaagatacaaaactgttacattgatttgatatttatagaaatattctgtaactaacttttattttttagtaaattttaaatttattttactctgaattttaataaacttaaaaaagacaagaatacaattcctaaagaagtaaatattaggtttaaaattcgttaaaacaaattatatattttttttaaaaaaaaagtataattattttagcatataagtcaataacataagggaaaaattacatgtttttgtaaaaggttgaaaaaaaatacactaaattaatttttgaataaaaaatttaccaaaatttttaaaatttaattgttaaaagtataattaggctaaaaaatactatataaaaatagaataatgtgagtcatccttaaaattatataacttaaatctatataatttaatgcaaaattgaatcttgaatattttaatttaataataaaataatttacaaacttacaatgtgacatagttgttgtagtttttataaactaaataatttttttgttattttacggattaaactacgatagattataataactttttatatttaataattagtataattgttagaagcaaaaaattccaaaaccttacagttcaaactttggaagaatggcggtgattatagccattttttcgcgccaaattttttatctttgcatccatttaaatacccttctccttctcctgtaggcaaaattcttgtacgataaatgacacatcttttcttggtggaaagcagaatgtggaggcaagtgaatgttagaaacagcgatgagtcgttggggagaacgagcaagatcacttcggttcttgtcgcctccatggttgataagtacctctgcgacaatgacttctccaacatgcgttacacctttcgcaacgaggcatcttctctctttctcagttcatcactcaatcaggtttttcgacactatattttgcaacctttttagactggctttctttcatgacactctcggccataagctgtattatgtgttttcgctaggtctcctgaccccaatttatttaattgtttctttttaggatccgaaggatttgttgactttggaggcaatgcttgacgagtatatatttttgaagaaacaaaatgcgatactgaatcaaggaaggatcaccgtgatgcaagagagaaagaggattgaaatcttttggcaaggcatgcagaatgccctgaacgcttacaatgcttttcagaggccacccccaccgaatgtcgcggcgatgaatgcaaattttgcataagtttctccaccaagggtttgtgatagaactcctccaggtacgtttttttttattattttttaacttaactaatcatgagttgaattattggttatcattgaattttcttgttttaattcaagaaggtttaaaactgtaattgcttagaggtcaccgaatccatagccctcaacccattcccattcagcccctatttaatccattaaaataattgttccttgtgtgcatgcgagtcatttccatctccaacccatgaatttaaattccttttagggggttggcgttttaggtggttgttgcatcagccttatttgcttgcaatcatgagttgaaatattgatcattattggatgctctggttttaatttttaaatgtgataagttgttcttggtttctagatgtggtctacaacttcaattctttagagctgtcattgtgtccatagcccacaacccattcagcccctcacttaacccattgaaattatagggctagtttggatagaagctagaagagcttttgagaggttcttatttttgttgtgctagcaatcttcattgtgaatgttattgttgtcagttgtagtaactttaaattgaggttgcgatgctacagttgtggatgcgttgcgatcacataagctggtgttgatgtgtttaggttagttttggtgttgctttgcttttttgttaggtgtttcttctattgcaaatattggttctgccatgcaaaacacatttaacatacagtcgcagcccaaacccatcaacaccaatgtggacactggaaacttctcaacacccatgattagtgcgtttgacaagaagagataagatactgaagcagtaaatgggtgtagtacagttgcaaagaaacgtcgtggtagaccacctgggaggaaaaatcaagtccaaggtataattgtctgtgcaactattaagtatatgctaagctttcatcatgtcatcaattgaatttttactccatcttcatcgttagggcaaaacacactgccacaatcaagcaatgttgtcaacaatcaagtagtttcttggcaatcttctgcaactctaccatcatcagggaactgtgcacccagcggatcacaggttcaaggatccaatgttgccaaaggctcattcaatcaccctctgtttttcgatccaaacaattcacaaattctagagacacctcttagaacacaatcctctcattgtgatacatatgtatcccctactaattttcttgttgcatcatgcaatcaagatgctagtccctcttgttgcactatgatttcaaccaatggagtcatggttggccctgaaaaacaaatggcatataaagagagcagtcattgcatttctcctatggaagtagatacaggcaaagcaagtgagaaggatgatgtaatgagcaaactgaactttgatgcctctaatatgcctaagagcttggacaaatcattggctaatgaggtttctacatctgagtcggacaaggaagttgacatatctgacatcgatttttcaaacttggactggccactcccaggaatcagtgacaaagatttttctttttacgatctaggtccaaccgattccaacgataatgcttgaagttcaaggtattttttctatttaatgttgcaattccttctttgttatttaatgcttgtatctgacattctttgtatctttatttaataggtcttctcatgaactgcaagtaagcacagataaatatttgaatatacaaggtaatcaaggtcattgtgtattcttcataattttgatctaatctactgtttactgagttttttttctttttttttttaacgttgcaggccttgatagtcaacatgtctcactgtgataaaatctgaaacaaagtggacctgcagttgcccttaatttgggatatcaaacaccattaatttgttccttagcctctttgcttgtcagtaaacttaggtaaggctaaaatgattaatcttttagtgattgtagatgactttagcccatgttgtttcttgtttacttgaaccaaaaaggaataagttacagaaaaggaattcatttgaattgaaagacttcttccgaagtaacaaatattgttggttgggtagaaaattattccatgccagatcacaattgattgatttgatgttagcagttactaatcactataatggaaaagtttgactatttttgtttgtcatttccactaattatattttcactgttcttatgcaggcagtacaactgagtatttgaacttagcagtcaacaaaggtttatgttagggtaaatggatccgatgcaactagtaatttgttatgtgcctctgataacattcatcaattaaacaattggtttggcgtgggatggtataactaagcattgaagtgaaagccttcacatagttgtgtttctattttgtcttgagaatagagctagaattgactttcttcaagttgggcttgattactagttactgtaatggaataatatcagctgagtttcattattttaatttgtcatttccacttcacttattatattttcatcactcaatacaacacagaattttgaagttacttgtcaacaagatttataactttatgttttcttttttaatcggcaaaacgaatatatattgttggaactattagttaatttagaattggaatatatccaattgcacaagggtcagaatctgagtagtcaagaggaacaatataatctactacaactgtacaaaaaccaatttaaatagaacctgtatgataagtatgaatcagacatagatgcaaagagatgaaaagatccgagcccaacaatgttgtctccttaagacaatttgttccctccagttgatgccaaaggttgatgaacaattgtctcccaggatagaacggatcaacgtctgaagattgatgacacttcaaattaacagcccaaacgaacaaagacaatgcttgaggaaccacagagttatgtgatatggaaatgcactagtttctaagcgagactatcagaaaagattaactatcaaaactctatcagttttctacttccttcattccttcctattttctgactgtctctgtgtctatttatagacaacaaacaaccctggtgaagagttgtcagtaaaccatcgcgactcttggcgatgaaccatcgtgactcttggtgatgaaccatcgcgactcttggcgatgaaccatcgtaaccgttggttatcggagtggttgggagtagttatttttctaacctttcccaagagcggttaggagtagttattattttgaattgttaaccgcctcttattcataaccaatggagcttaaacaaaaactccaacaatcccccacatgaataagagatcaattcaacatgactaaatgcatatgaatatgtatgcaagtgtgattcctcggcgagaaacaattgcatcgagataggtaggggttacctttgaaccttctctagtgtaaacctatcgggtatactaggtcaatcggtggtcgtgatgccttgaaccgtcgacctttatgatgtataccgagacaataggagacacacaattgtttctctagcattgctcgtcctcattgttgtgtccattttggccgtggacaccttcctggttctgcaagtgttgtagagaatcggcctttttaagttctcattgaagcggccctcacttcacactcacataggtgatttcttgtgatatacctccacatacatcatctgaacacatcagattaagaaaccattaaaagccattatgcttaccctcatatacactgtattgtcataggaatgagtatgagtttaaaaactccacagtgtttaacagtcgatcatgacttagttgtctctttgaacctagttcgtgggatctccactcatcaaggtagagttaccgcgatgatcaacaattgataggccttaaacccattcctttcgacaaattttcaactaactctctaggaatccctttaattaatggatccgctatgttctctttagacctcacatagtctattgagatgattccattcgagagtagttgtctaacggtatcatgtctacgacgtatatgtctagacttgccgttatccaagacgttcttagccaagcacccccacactttcaagtatttcaaggatgattgctttcctttccatacttcgtatggtatgctttttgtcttcttgtgaggaactctattaataatatagtttgccgtcaaaatggcttccccccacaagttttgtggtaaaccagacgtgattaacatagcgttcatcattttttttaatgtccgatttttcctttctgcaatcccatttgattgcggtgcataaggagcagtcgtctaatgtataaccccagattctatacagaattcctcaaagaggccatcatattctcccctacgatcgctccttatagccttaattttcttgttaagttgattttcaacttcatttttatattgtctaaaagccacaagtgcttcatccttactattaagtaaataaacataacaacatctactgcaatcatcaataaaagtaataaaatatttcttattacccctagatggtacagatttcatatcacatatatcagtatatattaaatctaacaattcagttgatctatcaacagaagaaaaatttctgttaacacaaacagaaaacactgattaatcacacagattaatcgttcaaaagtacagagagtagacaacagtatataattcacaaagatagaatatactgaacccagattcaatcaaattgtcttaagattgttggaactattagttaatttagaattggaatatatccaattgcacaagggtcagaatctgagtagtcaagaggaacaatataatctactacaactgtacaaaaaccaatttaaatagaacctgtatgataagtatgaatcagacacagatgcaaagagatgaaaaaatccgagcccaacaatgttgtctccttaagacaatttgttccctccagttgatgccaaaggttgatgaacaattgtctcccaggatagaatggatcaacgtctgaagattgatggcacttcaaatcaacagcccaaacgaacaaagacaatgcttgaggaaccacagagttatgtgatatggaaatgcactagtttctaagcgagactatcagaaaagattaactatcaaaactctatcagttttctacttccttccttcattccttcctattttctgactgtctctgtgtctatttatagacaacaaacaaccctggtgaagagttgtcagtaaaccatcgcgactcttggcgatgaaccgtcgtgactcttggtgatgaaccatcgcgactcttggcgatgaaccatcgtaaccgttggttatcggagtggttgggagtagttatttttctaacctttcccaagagcggttaggagtagttattattttgaattgttaaccgcctcttattcataaccaatggagtttaaacaaaaactccaacatatatatatatatatatatgtatgtatatattataaaaatggtaccagaagtacctacaacatgatacaagtaattagccacggatcggcttacataggggttatagaatatttataacttaacagctacaaatactcaataacccacgaaaacagacccaccaccaatagtaattacacaagcctataagaaagatacttccatcctaatgaactccacctctgtcaagctttgcaccgcatacaccagtaacaaaactgcagaatttgaattacaaagtacactgcatcataccaatgacatgcagttgtgttactcatccattgaacaaaagagaagtgaaatgccgagtcgaattgcttaagccaagaccatgatacaaaagtgatatcatcaattaaacttctgttatcaatctattgttgattaaagataactgcatttctctccttccaaatgcagaacactgccaagcaccaaatagtctgccaccacaccttgctagagcctgctgaacacatattagtgttttgccaaaatagatcatcaataaataagtgtagtactgtggcaaaaccaactatattagtgtttagcctttgggggtggcttagtatgccacagtagagaaaaaaacatccttcttcacttgcggtctatttgcaagagatacattgatataattgatataattgttgaagttgtacacgttcaataaattgatataattgttggacttgctctttttcccactcaaaacactctcagtttccacctccaaactccctccacccactctcccacattgttaataagaccatctttgaattcggattagataaatagcctaggaaataaattcattaattttgatagcgaccaccttagggattttttttttattttaaaaaaagagagatagataagacaataccgaattcaccaagcaaattcttcctgcaaaggagatgaatttgtgcttccaaagagctagcttgttggagaattttttgatgataggctcccacatttgttgtttcttatatgttagggggaatgaattcagtgtagtcatgcactcacacgatcagtgattagtaaactatgtgataaacatcaaatgattaagagatatcaaactgcgtttaaaatctgatttattacataacatgagtgacctgatcgtcatctaatggtttgaattgcctactgcatacaaatgctgattgcagacaatgaagaaacttaggcagagaattttgttttgttttaatttatagtttataataaaacaaaatattataatggctgaggacatatagttgtctaaaaaccttagatagattggattctcttaatctgattttcttttccattttgtgattctaatcacttgaactttgcaatagacatgtcataacatgaggggtctttctattctttttcgcttcattttcattaggctttgttcatataaccaatgttttgaaactcggacaaaaccaatcacatgttcgatccattgcttcttaaaaaccagctcaaaatcactaaacttatcgaaaatcggtaaacccagttgttaatcagtttaactgatcgaaaattggtaaactcaatggataattgatttaaccggtttcacttaaaactatttttttttttactttgaaaacgacaatgttttgatttaaaaaaatatatattataacttatgacacttttcggtgaaatttgttttttattatcattaatttatgcatattatgttttatttatttaatattattaggatattatgttaaatattaaaaatatatatattttattaaaaccagttcaacttaaactattgacccttcctcgttcccagtttgatgatcagtccagttctaaaaatattgctaaaaacattgcttataacttttttctatagtacaagaaactgggccttttgggtgcaagaaggagaagtttttgctttttttcaagcattagtgttgattgctaaatcgggattccaatctgttatttatgagacagattgcaagctgctggtagaccacattttttctactgatcaaaatttgtttgaatgtggcattcttattgatcatatcaaagatattcttggaatttagcctggcttcaagatccagtttgttacgacttctgtattaatcctagccaccatgttatttcttgtatgccacaatgtatttccaattatgttgcaatggaattgaattagtttgctactgcaaaaaaagaaagaaaaaaacttgggccatttgaagtcctcttcctctatatgcatacacattaaaatgttgaagaatgaaaagaattgttttaatatgcttttctagaagtaattataggagaaggaaataaaaaataaataaattgagtttcttcaaaaattaaaattaattcatcattagttaattattagtaatttgtaaataccttctcatttttaaggtgggtttggttacgaagaaattggtgagaagaaaagaaatttttttaaaaaatagcatgaatctcacacatctttctctctattttatttcaaatatttcttttcaattctctttcttttctttcttttataataccaaacacacaaatgcgataacttctataaatcagttaataattaactaatgaaaaattaattttaacttataaaaaactcgatcatttatgttttaaaatttttttctcttattaatgcttttatggtatgtttaattgagaagaaaaaaataatattatagaaaaataatttgttttagactcactccttatacactataactttacttaaaaatattttcatcctttaaatcaagcacaccattaaagaagattatccggtgaagttgctttagctagctgtcactccagcatctcattagaaaatcattatctaattatgtgtgaaagatttgttcatcaggtaatgttttcttactagaatagcaggtgtggtgtgcgtcaagggttactagagtcacacggattcatagcttgataggaactgtcttcaatatatatttttattgtaaatattaattaacgaaagctgaaatagttcagttggttagagcgtgtggttgttcatcacaaggtcggaggttcaagccctctttctagtggttctgaattttttaagttcaagaatagtgatgtttttattggtatatcctacttgaacttcgacaaggaaaggtgataccaaaatcgatcgagttttatatgtaggataatttaaagtgtgtggttgaacttgaattaccagatttccatcaataaaattctttcgcttaaggatatgatgatattgatttacactgttaaaataaacaaaaatatggtatatattgattttttttaggagtacttaaaaaaataataataatccgtgcattatataatatcggaatatattattagagcatctccaattaagatatttatatgagttgcttaactttaagtaatattatttaagtttttttcttattggaacatatgatgtggaattgattatacaaataatcgttgtttaataacattatatcataaataatataaattaattgtgtgattgtatcagtttaacaaaaagtttcaagtttgaattctagatacaaaattgagttaaatacttggagaaatgattttagtgtccattataatcctattccattccaataaaattgtctctagtagaaaatagatgttttgtcagaagcttgctctaaaattctcgaaaaattagctttttatgattatatcggcaataatccaacaaaaggcgggttatttaaagcaggttcaatggacaatggggttaaggaaaaaaatgtctctttaatacatgtaaatatatttttaaagaaatataaatgtatgtattatttcctcttattttatatatgttaaattagttttaagtctactaatttattattaagattcaatttagtcttctaattttttaaattgattcaacttgatccttaattaattataaaaaaatcatactttataacaattcaaattcatcactaagtgattttaaacggttacaaaatacatattttctaaaaaaatgatttgtttttaaaaattaaataaccaaattgaacttaaaaaaaactaaaggaacaaattgaatcaactttaaaaattaaagaaccaagttaaacaaaaaaaaaaggtatatgaacaaattaaatctaaaaaataaattaaaaaaacttaaaaactaatttaaccttattaatttaaatgtttttgtgaaaaattcttaattattttttttataacaaccaatgtacaaaaactctaattaattaatggaatgtatagaagtattagtaatatattttaatacattcgttttaacctacctccaattgtggtacatcttgtacaacattggatatattaataaagttagttttgctagtaaataaaatacattttttaactcactttttattatcaattaaaattataaaattgtaagtaagatttaataaataaaaatagaaattataaagatttataatttttaataaaatttaatcaataacaaaaaatttattggaaaatatatcataaagtatataaataatatttttcttacctttaagcttggttggtacattgatacatcatgtaaaatcctttttctgaatccagaaagtctttgaatgataagccttaaacgtagtagtttgttattataatagaatcaagatactgctataccaaggaaaagtaggaaaaaaaacccaggaaaaaaaaaggaaattaaaatgagataagccattccacttttctatagaggtcgctgatgggaagccagcttgcgccattgcgcgagagtcgtcactacttcgcgttgactctttccaagtcaatgtttaagttgtatatattaatttatcaactaaattataattttttcatctcccaatttttataaatttgcaatttttgatttcttatttttaattaatatattttgtcttccacttttaaaatattcatgattctagtaattttattttttaattgagatattcggttcttcattttcaaaaattttgtaatttttgtctcatttgtcaattttaggcttaattatgtatttttttttataaattaagcttcttagtaattaagtaactttttaaaaaaatatttaccatgttgatagtaaatagacacacatcaatcaatgtttacaaaatacataaataaatatttaaaattgactataagaactaaaattgtgaattttttaaaagtgaagaacaaaatgtcttaattaaaaaatgtgagactaaaatcacaaactttttaaaaataaagatgaaattgcattaaaaaaataaggatattaaaatcatgaatttgaaaaagtagatgacaaaaaattatattttagtctaatttattagggagaaatgtttccaacaccttttgtatcttaatacaactgtcaaatttttattataaaatattaatttaattaatattttaaatatttttctttccaaatttatcatttgtatcccacgaatcatgaggtgaaacgataaaaagaggatactttttttttcaatattatcaaatgggagaaaattttaaattaatacctagaaatggataagtgttaaattatcctacgactttcaaattgaaaattataaactatgttatgacttttttttttctttcttttttcatttaagttgtaaaatatgactttatttttttgcaacacaactttaaatttgtacgagattaatttttttttcattgaagttataaagtacttcacaacttcaattttttctttcagaaccactttaaagttgttagggtattttttttctttttccatttacgacttcaacttttattttattttaagtcgtaaacaattcacgatttcaaaatcataaataatattttatttaaattatttaacaaattaatgtatgttttatttaagttttatttaatattttctatattttctattattttatttaatactttttgtatattattttatttaatatattttttagatttaatattttctatattttttaccaatgttaagaattattatttattttataaattaaaaaataataaaaaataattaaattttaataaaaatatgaaaatattttttaattaatattaataaataatattaacatataatttatcaaataatattttttaaaaaaaattaaattaatttttataattatcattaagtaaattaataattttgtatagtggtattaattaattttgttttataaattattttaatattaacaattgtaaataatttaataataaaagtagttgttaaaaataacataatacatcaatataaaatgaactaatacaaattaaacacaagcataaaattaaaaattagaaaaaatattagccgtcaacttacttgtatggacaattaatatgatcataaaaaaattgaagttgtaaatgaaaaaagaaacaaaaaaaaaaaacccttactactttaaagtcttcctagaaaaaaaattaaaatcgtaaaatattttactacttaaaaatataaaaaaatctcatacaactttaaaatatgttaaaaatagaaacaaaaattaaaatcataaaatattttacaactttaataaaaaaaaatcataacacaacttacaactttcaatttaaaactcttatagtaacctaaaacttttttctaaatattaatttaaattttatctctatttaataattttgaaaaaataattctcccttttccttcatttctcccgaatcatgactagtgagattaaaaggtgcgtaaaccaaagcccaagtggcacattcagtgttgagagtaacgtcgatgtcgaactctgtcaaatagaacaccattttccgtagtttcgacgatagcctcaccgacacaccggccaacacctgaaaccctctgatcgtgctcctctgccacaccaacagtgtggccacccaaatgaacacaaagagcatcttgtgcgatgcaaacaatgtcattttgagatggaataactgagtgtgtgagaaaataaaaacacaacgtaagtatgaatgagacgtggtagggaaaacctttaacaaatggtttaattgggtcgcttgttttgtcggaaccaagacgtcggaggctttagcatttttctaatttattgagttgttacttgtttttaagagtttttttttctacaatgcttcacttcatattcaagaatttatatttttttttgaatgataaatatgaaataagttgtttaaatgaacctaagaaatatattttttattatttaaaattggctaagcaatgatacttatataagtaatgacatatcatctactttaaacttgctggaaaaaaaatatctattctagtgataaatcatctaagaagttacaattaaaagataaatagaaataaagataaattgtaagagataaagatatgaataaccacaaatagattattcataacactatttcttgggcgaaaaaacaaataatatttttttattaaatatttatgaaaaaggggttatgtaaaaaatattgacagaaatgggacagtgtaacatgcctggattaggcatgttacaacacgcctatattgggcatgttacaacatgcctgcttgttttagatggaggctagagacccatacgttccacatgccacatggagagatgactatcacgttacaagatgtggttggtattttgggattgcccacgactgtcaatgtcgtcactggagtgactttgtccaattgggcggaggtcattgaggacgttttcggtcaaaaaccatacatgcccgaatctgctgagcatcgtatgccattatatgcagagcagggcactccatgtccacctctatatgtctcatcatatgaggcaggcccttccgaggcagacccgtatcggccagatccttatcaggcaggcccctcttaggcagacccggccaaggcaagcagttctcaccgacctcgacgacggaggcaacctgatagacaagtgcgtcatgtgatgtggccaccaccgtcttagatttagtcggttgcttgtaccatttattttaatgatgtgtagtgtaactattatgtaggtaacatttgtttgtttgtgccatttaatttttttttaatgatgcttagtctaagtattatttagcttataattaccttgaaatgcacgaattcatgtgaatcccattttttttatgcaaagaacaataaactcataggtctgaagtaaaaaacaaaatagaacgttcatttgtaataagaacaataatgtaaaacaacatattcagcgcacatttctcattccatctggatgtcaggtttgctaaaaatagctaaaatttcaattggacaaacatttccagtagtttgattctgctatgatcttgaacacgtcttcgtctcttgtcaactcttttatgtgatattcgattatggtgtttgaatattgtgcatggcctggatgtcgaaaaaacaattttctcaccacctgtgacatgtgaatcccatcaaggggaaatccaatcggcacaacttccttgatgacagccttcagtctttccatggtgcatgcagaaggaatttgaaatcgtattaggtttgttccagtaaaggcataacccacaaaacctgctcttcggggtatgttccactttctattgtaatatagcattgcatcatgcattggaacgattgtggattgaagtaggttgagtataccattgggtgttctgtggatggcacataaaatttcaattgggccagcactcgacatattgtcactgtaccttaacattctgcaaacatcatcatcatttgtgagtgccacagaagtaaaaaaatagtgctgacctgcatgcagggatggttgtcgatagtagatgttatcaacaaaatggtcatcagtaagaacaagggtgtgctgcatcctactcttcagggtttgaaatgaacagtcatcaggaactcgcattggaattggagttgcacattggaaacaaacccttggttcgtcatgcttcgttgatccattcagataaatgaacgctaactttgaattaccaatgttctgactgctggtttctcctaagaatgccatcgtatgcacattgaatttttagtgccgagagttatatagggctcaatggtgcccaacttgggcgtgtgcaatgacagggtatttgttaggcgtgttcaatcacgcccaacttgggcgtgttgaatgacggcctatttgttaggcgtgttcagtcacgcccaacttgtgcgtatcatctcagaccttgtttgacatcgtgcattgaacatattgttacatcaaatgcatacattatcagacaaccaaaaaatcaaacatgattagtattaaaacgttataaacaaaaagttaatacaaaactaatataacatatcaaataacgttgtacattaacatacaattaataaaaaaaacatacaaccactcagaaaatcatgaagtccctccacgactaggacaaactctctggttgtgcccaacttgcttacaaatgtcacacctcatacgtctctgggatgtttccacttcgtccatttcgttagtatcctagtggacttagaatgacctttggcacgcagcattgagctgtcaggtatgatgattggaccttcacctggtggaatgacccgttcgttacctattggctgccatggcactaaatatgcttgcaccaacgtacttacaaggaagatgtcatccacatactgaaaaggattttggcgcacatgtaaagcagcagttgcggcatgactgcatgggtatttgaatgccttgaacttcctacactgacaaacccgatcggcaagggacattgaatatgacttgtcgcacctatcatccacctgaaataacgtttgagcaacgttatatcttcgtacatggtgccatgaagctagggactgattacgcctcattgcttcaaccacatttttgcaatatcgttgtgaatgttgaagctgttcggcagccgcctcaattctgtctacaaaatactaaaccagacgggtgtacgtgtgtttcacaagagctgtgataggcatgttcctggctcccttcaacaccctgttcactgattcagccaagtttgttgtcatgtggccgtatctttttccctttacatcatatgcacgtgtccatttctccttggggatggaatcgatccattccgcaaccttaggactggtctcacaaaatcgagcaaatgcgatgtcaaactcgaccataaagggtgtataacctgcaacatcaaaaaatacatcaacataattctgtttacaaatttttctaaaccaaaagtatgataaatatcaacgctttgagtcacctaaattcatgagggccttcttcagtcttgcatctttgaatctttgattaaaattactgacaatgtgacgcaggcaaaacacattatgcgcaaaaggtggttgccaaccaagatgactttgaacaacagatataatgctccggtggcgatctaaaatgaggcatatattttgcatgagagtaacgtggaagcgaatgttagaaatgaagtaattccaaaaatggcaaatgcgcacattcattattcccatcctaagttgtggcaaccaacaattttcctttatatttgccatataaatgagtcccatcaacttgaatgatgggtttaatagttaaatgcctcgcaacactgtccaaaagtccaaaaaatgcgatgaaacacgcgctttgcccatatcagtcgatttgcaacgaagtaatcattcgtctgaatatcaaaataagaacctggtgcaaaacgaagcatgtagttacaccacctgggcaagaatgcataagattctacccagtccccataaaccattgtcattgctttctgcttcgcataccaggcctttcgataagaaactttaaatccatatgtgttggtaatcctctcctgaaccaatgagattgacactgatggttcctccttaatcattcctaaaaaaaacaaaagtaacaatcacatcaacaacatgctttgaaaacaaatatgttttcgaaatgcatcacagtgaattaaaacataccaacaaccagtgcagcaattacgtcagaatcaagctgtctgtgaccttgtgaaatatgatcattcaagcaattgtgttttccaccccattttgaaacaacccacttctcacggaaaactggtttaataaccctaaccctccaagggcaaccatcagtatgcgcaacacacttcatggaaaacttgtcaggcttgctctctaccacctttgcttgtttaacaaacaaatcatcccctagttgccacagaccatgcactgatcctgaacccgaaccagaaccagaaccgctaaaagagtcttgttcgggtgggtaactccaatcaatatatgtataatgaggaattccttgccagaaaggaatcgccccagcagctgcacattcaacaccagtttaattaacgatatcaactacaaagcactagtaacacaagttcttaccaaaaaatgaatcacttaacatttataagtatctatctaaaaagtaaataaaaagaaatcaacttaaaccctaaccctaaacaccatgtacacctacagagacaaccctaaaccccagccaaaccctaaaccctaaaccaaaccctacatcccaaccaaaccctaaactcaacacaaagccctaaaccccaaacaccatgtacgccagtcgacacaaccctaacccctcacccgaacacccaaaccataaaccccaaccaatccctaaacctcagccaaaccctaaaccctagccaaaccctaaacccaagccaaaccctaaaccccaaccaaaccctaaactcaccacaaagccctaaaccccaaccaaaccatccaaaccctaaacaccatgtacgcctgccgacacaaccctaacccatcactagaatacccaaaccctaaacccaaaccctaaactcaaaccctaaaccccaacaaaaagccctaaaccccaaccacaccctccataacactgtactatcaatcctaattccgaacccctaactatttaacccaaacaataaagcacaaacacttttggttaaacaacatatacctaaacaatttactatacaaaacaaaattctaccatcctaattcatttagtcaacaaacttaactaacaaaataacatcatttcatgcacattcaaaaacatattaataaacaatataaaacaaattaaatgacaaaacattctaattcacatcctcagctaatttaccttgttctggttgactagaaccaccctccgcatgatcacgactttcagatggcttgacattaacatcttcctgatgcacaccagcatcctcatcgtcatccgacgcattagcatcctcctcaagaagccgatcttccattgcgatattttcatcatcatcatccatgacccaagttgggtaatgtgaatcctcctcaaacatgtttacctctctgccaacaaatgatgcccctccagcagcatatgatgatgtatgatgtggaactgcctggatgggtaaaacaacatcctcaacttgtgtaatatccaagtacaacttcaaaaaatctttccttccctggttgcaaaattcatctagtaccaactccacgtcttcatcatccattatttgaaaccccatgaacttctcgtgttgccataatcttcccgtcagtaaagtgatacactggttgctatttagacataatttttgttgtatcttatcatgcaattcactaagtgttgaggtacgcctcacagaggttgctcgtgtttccccttaaaaaatgacaccctgttggccttgatattttcttccattacaatataagataacacgaacagaatcaccacttgaactcatgcttctcgtcactccaaacaacttcaaaaatctctgaaaaaaaatgaaaatacactagaatggtaggcagtttagcaaagacacagaagactgcaaggcaacatataagggaaatgctgagggggggccatatttatagaaatggggcagctgtaacatgcctggattaggcatgttacagcacgcccaatctaggcgtgttgtaacatgcctaatccaggcatattacattgccccatttttgtaaatattattcaaacaacccctttttcgtaaatatttaataaaaaatattatttaggttcttttgccctatttcttggatgtccattatatgagaatatgtctctttaaaaccttactagaaaaaactatgtgggatgaaaatctagtgaaaaaaaaaagagtattgtttcttcaaatgttatcacccacctcattaaaaactttgccctaaaaatccaatgagacaaaactatggctaaggggaaaagagtgcatactgtattatttcttcccctcatgcaagtaattatcttaagaccacaaagttcaattttgtcaaccagttgctcaaaagtcttccttggcaatgaattcataaagagatcagctatattctcacacgaacgaacttattgaacatttatatcactattcttttgaagatcatgagttaaaaataactttggtaaaaatatgttttgttctatctcctttgatatatcattctctcaactgagcaataaatgcagagtcatcccaatgacaaagcaactaaagcttatgctttaggcccaccggtaaaaaaaattctattagtatttataaagtaaaaaaagtctcatatgttgataaaaatgacacatatgctagtaaaaagaccaacatatttaaagtaaaaaaattcttttaaaatttactttaggcctcgtttatcattgggccatccttgaatacatgtaacattgtcttcacatatgatcgtcgatgttattttctttttcatgtcgggctaaaatttctgcatgattagcttatatgcctattttggcttgtttcacatattgtcatggaattgttgtatcacctcatgtaaacttaagatatatcaccatgaggatttgacaaacaaccaactatgtaacaccccaaaattttggaatcacaatcaactacagggataaaatgttaattagaagcaatacagaagaatttaggggaatgacgaaaatacccatggatattttgaaaaatgactaaaatacccctaggtcttttagtaatatatatattgagaaggaaatcttataaatatccctaaggttgtagaaatgaccaagaatacctcaagggaaacaattacagaatttccctgaacatttttagaaatgacgattttacccctagggtgagggataaaattaccaaaatgccctttaggtcaaaaattgatcagatgactttagaaattcatgagaacctcaggattggataaaatacttttagacaacaaattatcaacatggttggtggcagagaaccataaacagtaatttctaggaattttagaaatattttggaaaaaggacttaaactagactaccttaggtgtcagaaaattataagaagaagatggacataatccctggagttttctcttaattatggaaggaataggtttcccaagtgagtcaatttagtgattttaataattcaaggtaagaaggaccaataaaaagcaaaataaaaacaaaagcataaaatccattaaacctaaattattccatgtgtaaaatggaaaaacttgtgaagattactcttcaagctagcaatcttacgtagaaaataaagaagaatgtggaaattggacacttggaaggtagagaaagaatagccaataggaaagaaactaatggaaagataaataatgatggcttaagaggatttttttaaaaagaaaacttcctcttgaatcttttaaacacggaggaaattctagaagttatttcaacaatcccaacggtcaaaagttatatatgtgggttaggagtatccctttaaaattttaaggagatccaacggttaatgaatccataaccattattttactaatacgggttttggaaaaaatcaaaagcacaaactatctttaaacctaagctatgccacgaaaattgatggagattgctctccaagctgagcaaatccacgtgcaatgctagaatggtatggaaaattcatgaattaggacacttggaaggtgcaaaatggatagccaatgagaaaaaaccaagtaaaaagctagtaatgataacctttagatttttgtagaaaaaatcaagcattaagccaccctataaaaaggagtaagatcagatattggggggctctaagagagcttagccatgcaaattcactccaaaagccttccatctcatttctttctaaatctaccttttgcctagaacacaaaacaagagcctataccttggaacctcacgtgaaacactagccatcctaggagcaagaatcattcaagttcaaagggggaagctgttcaaaaagattaagaaaggcaaggtatggggaagtttatgttatgcctagtttgaatattaactacatgaagattcttacttggtttcataagaaattaagctttgcatgttaagtgtttgatgaaatgcctcaaagaaccaacgatttctatatgaatggttaattgattaaataacttgattttagtgttataaacgattattaagtagataacttgaatctaacttaattaatgaaagctaaaatgatttacaattatatagaaataattgtttaggagtatagtgcttcatagaatatttagttacaagtatatgttgaattaaagtattctatgattctttgagtttatatatttaattgatgctaaacttatgatgacttgaatttataagtatttgcttttaatgaagtacatgaatggtttctaaagtttagatggttttgctttgagtaagtaaaagtgatatagcttgctaaaataaatcctttgagtatatttgttatgatattaggtctatgttgaaattacgttggttatgttgaaccaattgaactgtgatgatttaggacttgttttgttgaatctatgaagtggactgttattgtagaattggaatgttgtataagttattttaattctgtctggcggggacataagaccgtgttatttttatttgaagcctggcggggggcataagaccgtgttattttatatctagcctggcgggggcataagaccgtgttattgtatagcggtgtgtatagatgacataatttgaactgtgtgctgtgttgatggtgtgatgagaatgctgtgttgatggtgtgatgtgaataaggtgtggatcatgcatgtctcttattttagaaatgatattataaccatgtaagtatatgtttctttatgtatgttttattcaaactatgtgtgtcatggacttaccctatttttgtgtctgtggttgacacctgtgatgaccccaatttatttgggcgagcagaagaacagtagtagctgagcttggatgttggactgaagatgtgcatggatcttgagttgaagatgtaatagagatgttgtgatttctattttgtgactgatgagatatatttgaatttttattactgggcatgtaatatggactgtattatggattgtaataattgtaccgtggtgaggacaaatagtttatgctacaaatcaatcatttgaagtaaggaagaaaagaatttttcgagaaaaatttataactaaaatcattctaatacaaagtggacacataattttaattaaaatcaatcgagcacgagagagtcatgagaggcgttacaaactacatgcttaaatatcttcgtattgatgaataattaggttgtgtatgcatagtaagataccttagtatttcaataacactaaaacatagtacttcaggactaaatacttcttcatttcaagatctagaaggatcttagttcacatctaaagacctttttcaatcattggaatatacaaatgaatgtgatttctcatataaaaccttttaagcacctttgctatataagcttcttggtgctcaaaatttatattctttgaatattcaatttttcaaacaaaactttatgcttcttgggtctttcatttcaaattatttcttcaatcaatctatcgcttttggaagctcttaaagagttccaacaatatttacgtcatctgcataaccaataattatggaaaatctattttcagattttcatgaaaatgatatggacaaataggatcatttttatatctttccttttagcaagtgttcactaagtcgattataccacgtgcgacttgattgctttagtccataaagagtattcttctcgaaaatatgcattattggacaaattatatctttcagagagtttcatacaaatatcattatcaagagtgtcgtataagtaagctgtaataatatctattagatgtaaaccgagtccttcatgttctacgaaagtgattaagtatcaaaagtactcacatctactataggtgaatatgtgtcttcaaaatcaatgttaagtcatgttttttatcgctcaatttcacgttctcattttgtttttgcaaaaaaatctatttgcatccaattggttttatgtcttcaagtgtacataacctacgtgtccaaaaacataaatgattttttacatcttcaagtatatggaatgcaggtccaaaaacctaactagttgtacatcttcaagtatatagactacatgtccaaaaatctaactagcttttttattttcaggtgtatggactacatatccaaaaacctaataatgttttacatcttcaactgtatagactacaggtcctaatatcattcattttgggaaacgagtctaattttgcctaaattgagtctttctattgtgaccaattatttctttgcctacaattctttatagactttggttcttgattctcattatcatttattacatttatcgctacattatatacaaatacattatcaatgttgactttattttggttccattgtattccattaatgacataatatgagatatctttattttcactaatttcaggtacctgagatcttctagaaccaaaatatataattatgtcaaagagatctttcagcatcctcacaaccttaattatgtaaatagaacacaaatattttaccaaacatgtagtatggataatgaaattagagaaaggaaaaatctaaccttgcaatatgaatttaaaagagcaattttctccaatcaaattctttacatgacttcttgtaagttgcaataccatttgtcaataactcattgaagaaatacaattgtgttgatgacatgttaaatataatataactcaaaagataataatagagagaaggtagagaagaaaaaagtttagagagaataacaatcatgtctattgtctccaagaggattaggggtgttcacgggtacgggtcacccgtgaacccgaactgatccgaactgatccaaacagtttgggttgggtcatttatatatttgggtcaaaatcgaattgaaacgatcaaaatcgttcatgtacgagttgggttacgggtttagattcacaaatccgttaatctgatgacccgatccatgaacccgtaataataatataaattttattatttatatatatatacatattaaaattaaaaaaaataatttgacaataaaaagggggtggtattgtaaatgtttaagattgcattcaaaaatatgatagaatactttttaatattgcattaaaaattaggatagaatatttttaagattgcattgcataatataatagaatatctttaagattacattggataatatgataaaatatatttaggattgcattcaaaaattggttaaaatcatatctttaaattagtataaatataaacatattttggtgttcatgtatgcattccattccaaataatattagagttttagagagtttatgtttgcatcattgagaaaattgttgtgagatcatatataagcgtttggcaagtctgattcttcaacactccatcaggatttaaaggtacctatttgcttaaggaatagaagcgtaaaggtagctattttattgtattattcttcttgactttgaaaaaggtcgcagctgggaaactaggataccagttttgtctttgttcttgatgaattgagacgtgcgacttctggctgggaaactatgataccagtctggctagaaaacaaggatactagtctgtctctattcttggtgaattgggactagagctttttgctggggaaacaaggataccaactgggataattgttatgtaagggtagactaggaaactaggatactaggaactcttgtacacaaaattatcttagtggagttgtccattggattgattatccaatttggatgtcgtggttttttatccaattgggttttccacgttaaaatcgattgtcttctttatctcttatctttatattattactttgagtttgattttaaattattaattattttataaaactcaattcacccccctcttcatttgggaccaacacaatattcatatgttataaaagttttaatagcagacttttataattaaaaaagttctcaattgacttaaattgaccatccatagttttatataaataaatcatggcacttaactaattgtttaggaccttgtattttagacatttgagttatgttctctgctttaaaactttaaagtagggaacataactcaaatgagtttgataggtatttggaggatgatgttgaagatgaccatcctgagtttgacattttgaattggtggaaattgaaagcatccaaatattatattctttcttgtatggttggagatatattggtcattctacttgtatctactgtatcatctgagtctgcatttagtacaaggggtagaattctggattcattttatagttccttgagtcctactactgttgaagctctcatttgtgtccaaaattggcttagatctattaagcaaaatgttaatgacttgcaagttgaaataaatgaagcggaaaagattggattaggtgtgtaatcccttatttcatttttatatttgtataaaatatcaattaatttttgtgctaacagtttttagagttgtttggtttgactttaaatactgctaatattgagtctccaaatgttgaaactgtaagtgccgaaacttcttaatgtattacttttaggtatattgttatttgtttcacctttttcttcatattttgtttactatgtttataatattaatgaatcatattttgtttatttgtttgtttcagcaaatctggtggcaacaaaattggttataacaaagcttgatttgtaagaaacaattgtaatttatactattatagtaaatcttgttcaaaaatcttttgttttaatttatattataagtttattttagaatattatgttgatggtattaaatgaatcaattttactactttcatacatttgataatattgtgttaattgtatgagatatttgaaagaatcgtgataacagttaagtacttcaactccaagtgcttagatcctctagaagtcctattattctttgtataaaatacaacaacgttgttatcacaaaaaatctttagtagcctagcaacaaagtccacaatgcaaagtcctatcacaagattcctcaaccaaagaacatgagtagcgccaacaaaaaagcaatgaactttacttgcacaatagaagaggcaacaagagtttgtttgtaactcttccaggatattgcacccccatccatcataaagatgatctcctatcattggggcacccaccaagatccgaatctgtgtacaccgcaacctcagttgtcaactctcctatacacaagcatacactccttagtcttctacaagtacctcgccaccttcttagtagctatccaatgatcatttccagggttcaacaggtatctaccaagaatgccaactatgaaagcaatatcatgtttagtgcatacttgagcatacatgaggctgcccaaagcactcttaaaaggtttgttgttcatatttcctctctcaatctcattcttaggacattgatccttgtcgaatttgtcacctttgacaactggaacacctccaggtttacaattttgcatattgaatctctttaagactttatcaatgtaagccttttgagatgactcgagtgtatgatgtgatctatctatgtgaatctcaatctctaacacaaaagaggcctcaccaagatccttcatgtcagaagatgttgttagcatgttctttgtgttatacaacatgacaaggtcattagaagccaacaatatttcatccacatatagaacaaggaagataaatttgctcatactgaccttgaggtacatgcattgatcaaccttattctccttaaatcccatggaagccaccatttcatcaaatttcaggtaccactgtctagaatcttgtttcaagccatagattgacctacataccacgtcctcattaccattaatacaaaaatcttcaggttgttgcatgtacaatgtctcgcataaaccaccattcagaaaagttttcttcacattcatttagtgcaactccacatcaaagtgaactactagggccataatgattctaaaggaatcctttgtcgatacaggggaaaaagtttctttaaagttaatacccttcttctgcataaaaccctttgccaccagtctagtcttaaatatctcaatgttaccatttgagtccttctttttcttaaagacccatttacaatcgattgccttacaattcttaggcaattcaactagctcccatgccattaaataacatagaatgcatctcttcattcattgcatgcttccacacttctgattgagggcaagaaacacttcatgataactctttggatcaacaatgtgataggatccaggaataagctgttagttaataggttagttggaatatgagttgttagttaattgtaactaactgttagttagtttgttgtggtaggggaagtttataaataaagaggtagtagctgttagcaggggggaatccagaaagtattaggagggtggtgaacctcgaattcactattgtaactgcaagaggttaatctccaagaatcaataaagattcattctttcttttcttgatctagtctagttcctatcactagtatcagagctctagattctggggctgtgatgaggtgaatggggtcgaaaaatagcaataaaatggaagtgcgcatggtgatactggagcgggctatggaagataattgcaaggcactagaaacccacaaggagatgatcgaatcgcaattgggttcgatcaaatcgttgctgtagaagctggctgcaacatgggaggggccaacaaaggaggagacgatgcaaataggggaagcaaaagggaagaacatagaaagaaaggatgaggaggttgcgcaatagtggaggcagattgagattcccgtgtttgcgggggaggatcctgtggggtgggtgtcacgaattgagagatattttcgtttctagaccgtgagggaggaatagaaattggacgcgactctggtggctatggagggggaggcattagcctggttccagtggtgggaatcttagagttcttcccaatcttgggagggtttcaagctggccttggttcataggtttaaaggtatgcgtgtggcaagctctttccaagctttgttagcattaaaacaagatgataatttacagagttgcattggccagtttgagaagcatgtaggggcatgaaaggggttagatgagatatttctaaaagaagtgttcttgaaggggttaaaggaggaagttgggaaagaaatcagagtgcataagcccaacaccttactagacactatggtaaaagcaaggtaggttgaagagaaaaatagaattctgggaaatttacccagaactggaagaggggtgcctcaattttcaaggcctagcttcttggatccaagaaataggaaataatggcagtaggggaatggcaggctgttggaatcagtagggagagctaatagtaaggataatgaatttgtccaaactgttagtacagaggataatggttggcaaggtagaagaaccttacataaattgtcacccaaagaagtgaatgagaaaatgaggaagggagagttttaaatgtgaagagaagtatcatccaacacatgtgtgcaagaacaagcaactgaggttgatgattatggaagaagaagatgaaggagacccttgctgaaaaacacaggtttttcctcacctggagcttggggacaaggtccatcttgaaggggaaggtattgataggatccaggaataagttgttagttagtaagttagttggaatattagttgttagttaattgtaactaactatcagttagtttgttgtgttaggggaaatttataaataaagaggtagtgttagtatatggatgtcctagagacaatcttttcattagattaggacatacatgtacttttcatattgtcatgaataaattataagcgttatttatcttgtttgatattttgtctcgatattattattaatatatgagtaactggataaaacccttggaatagaataggtatctcttgaatatcagtgatgggatgacgatcatgagaattcaaggataccaaatgtttactcctaaatttaagttcctagtctagagacactgagaatcgggattagcgatctcgggtaagactagcacgacttatctacttgtatgcagatacaaggtaaagacctcatgagctacagacatggagatgtcttagctaaagtcgtgggtggacctataaggatatagctcgcactgaacagacccacaaaaagactctatgaggaaatctcacagatagtatcattagagtagtctcttattatttgggtgtgtctttccttagaccagaagttttcacctagactgtgttctagaagacatgctttgattgtatacctcgtctgcctgaaacatggagacacataggtatacctttgggcatgtcctgaaagaacacgagtctatggtgactagcttaaggaattcgtcaaatctctgtgagagattaggttatctgtaaatcggagaaatcgggatgacatttacaggactcgggaatctatgcatagtaaaagaaatcatgagatgatttgcctttagagtcagtaatgaatgaagatcaagtgaagattcaatcaaggtgcaagtcttggagttttgactttcaacatggctcaagcattgaagacgattgtttgtaatttaatgtaaaaggattgaaagcatcatgatgatccaagccattatagcattcatgtatcatttaagtattgcatcatagatgagttaagtagttaattagaaacttaaaagaaagctaagaaaacagcatatagaagcaataatcgattactggcaaaatcttaatcgattattttgttcttaaggtttctgaaaaaccaagcataaacactttaatcgattaccttatcgggttaatcgattacacacaactcagcatacttgaaatttggtcgtgtgactgctttaatcgattaccatggtgttgtaatcgattacatgctcattggataaacttagtcactctgccttaatcgattaccattagatgtaatcgattattcttcacaaacatgatttaagtgtaggactgcattagtcgattaccactggatgtaatcgattattcttcataaaattgattttagcatatgtctgacttaatcgattacaattggatgtaatcgattacactttactatcagtatttttgctaaaactgatttaatcgattacgcatcgggttaatcgattatcttaaccattagttgaaaatctgattctgcattaatgattttaatcgattacaggagcttgggggagcgcatttaatcgattaactctgttacgatttcaactataaatagaaccctttggctttttgaattaacaactaagagagatcattactgagttgattttttacgatttctgagcattctctaaaggcatctaagagttcacaaaggtttcttctgggttcttgagtcttgcttccaatgattcattgatgggtcactaagattgttagtgaagcaagcttactcagtcacaaaggcttaggaattgattctgcatctttagattacattcaacctgaggtttctcattcatatgcatttttatcttggatcatcaggtgaattctttcctaaatctttgtgggtatttcgtttttctgcagtaactctgtttttgttggttatattgtaagttggttttcttgcaagggagatagggtttctccatgtacaactgagtaggtttctcagtttgggtgtagcttctaagggtctaatagggttttagatcactgaactttctctagggttgagaaagagaagtttgtaatatcttgtaagaaatatatttgcaatagaagaactctactctagtgttgagtagaagaaattggatgtagcctctaagttttgaggtgaaccagtataaatcttgcttcttgttttaattactgcattctttattgtttctgattgaactctgttttctgtgtgtttaaaatataagcataacaagtcttggattgaacttggataaggatatccatttagttttgtgataaagatccaaagggcatttttaactttgatttttgaacaagaaaattttaaatatctatactttaccaattcacccccctcttagttaattgtgagtgtttcttatttttccacaagtaaaattggagactccctattttgtattaaagtttaccctagaccgcaagggctgatatgtttccttaccctaggttttatgggaaggtaaccgaggagaaaggaaatacatacggaaaccaaatagatttaataggatgatcttgtcatttacctaactagttctggggcaacaaagcattgctagtgctctgtgttgtcattaaatgggtagaggccttgttgggcccaaactcatttatgtcagtagctatgttgggcctaatgggtcacacactaacactttattgtcatgacattatagcattaaaggttttgggcctaataatggttgttggcccaagaaagagtttagaaacttatcttaaagagagagaggcgcatgaatggagttaatggacttggatagtccaagacattattaattaatttaaatagttaaattaattatctaatatttaaatttgataatttaaattttgaatttaaatatgaattaactatagtagatagtttcatatcaaaatgagaagataggagctagatttgaatttgaattcaactagcatcttatcatgatcatatcctagattttaggaagaagtttgagggctgattagaggcttatcatacggctggatatttgattattatttggcaaaataaattccaagtaattgacttggtcttaagaagataagataggaggttgttggcaatttttgaaatacaacaactctatcttttcttcacgtgtgagatgcttcatgatcagaatttttggttaaaaatatgacctaaaactcttctataaatatactcttgtgatcatagttctctaatatggtttttgagaaaaaccctatctatcttcctccttttcacgtgcccctttgtgtgagttttggctgaaaattcagccaccaatatcatctattggtgagtctcttagataagtaaaacactttaaaacctaaccttcttcctctccattggtgagcctagcttgcctcctttggtgtttgttggtggcattcaagaagtgttcttgagtcttgacaagaagtgatgtggatcaacattagagggcttgtatcttcaagcctattcttgatcatcaattttcgaatataaacaaggtaacatctatgtcctaaagaatgattcttgtgtggtatgtgtttccgcttgaaaaattttgtttttctcacatgccttcgggcttcaaggcccaatcttccaggtagtagctgatagcaggggggaatccagaaagtattaggagggtggtgaacctcgaattcactattgtaactacaggaggttaatctccaagaatcaataaagattcattctttcttttcttaatctggtccagttcctatcataatgtctccaatgtcatacgcatcctcactaagatagacttgaaagacatcatcaatagcaggtctcctctctctagttgacttcatcaaaggaacctgtcgaatttgctcaactggttaagcattatcatttatagtaggaggatcaagtatatcattggcttgagagtcaactatatctctagttgcaattctgatctcatctggaacaattgggacctagtctcaatcggaacaactttcaaaacactaacaactggaacatgtagtggcaaagaaatagtctcaagcgactcgacatcaatatcatcatatggaacaacaaggtttgccacatcaagctacaaaaacttagcatttatggactctatgtaacgtccttcattacaataagaaatcacatataaatttgctaaagattaaatttccaaagccaaaaaggtttgaaatcacactccaagcatattacgatatccaatataatctatttgtgtataaactgaatcatgaaatttgatactcaaatgactactaacaatcctaaataagaaacaataaaatatattcaaccacataatggccccttattctaataaatcctagcaggtctaaaatcaaaataaataaatgagatagtaattcttcaagcctttttagtcccactgatttcgtctccatgctctagaaacaacactaactatgagatatttaatctcaatgaataaaacataaaatataaaatatttcgcaaacagttctttgcaactaggaaaatcaaccatggtatccacattcttttaaagtaatactagtaataaatatcttaaaataatagttttctcatagatattataacatcatcacatatgtctttcacataacaacaattaatcattgacaatatcacattcaatatacacaacactaaattaatcaaattctatgacatcgaagtgttatctggagatatactccttcctcgaagaagttacctcattcttaataatatggagcactaactcaatttcatatggagatatactccttccttgaagaagttacctcaatctcttgtaatgtggagcactagctcaatctcatatggagatatacttcttcctcgaagaacttaccttaatcttaattatgtggagcaccaactcaatttcttgtaatgtggagcaccaactcaatatcatactatcaattaatcatatataaaaaacatgatatcaaacatatcctgattaattaaatcaaccaagaatctatcacaattcaatcgattataaacacacaccacacaagcatggtccatctcagttaatcttataattataaattataaacatcaattaatagattataacacacacacacacacacacacacacacacatatatgcaataagtctaaaatctatcatcaatgaaatctaatatctaaaatgcatctgaccacctacaagaactctttagatcacgtttatgtccaactgcatatatataagcattacaaagttattttgttcgaaatcaattaaactataaccactcaaactacttttaaatttattattattaattaagccataatcatatgctttaggaaactttaatgaagccaaatgtgcgtaccagtcacatactattattctacaaggattctaccacctcatggttctaattaaaagcaaactctaatatataaggattgtacgtaattaaaaagtcgtttgtcaattttaaatcgattacagaagaatagtaatcgattacatttcacaaagttacaaaaatgtcttcctttgataattgattatgatatgtggtaatcgattactgggcgcgttttggaaaacaagactatctatattaattgattacatgatgatttaatcgattactttgctcatatatcttttccaaaaagctgaagaacattttaatcattgaatttgtttttaatcgattacattagtgattttaatcgattacagtcagttacaatagtctattataaatagttgttggaccttttgaaaataacaacgcaatactctacggattttttattgttttcaaaagccttctgaaagtgagaaaggatattctgagttttgaaactcttgtcccacaaattctaaatcttcattatgcattaaaagatttcttcttgggcaagatatcaaagaagtgtttaaagaagaagttctgaaacttattttcaaacatgattagtaaaatcatattcattggatcatcaagttgtctctctccatttactttgattgtaaatttatttctggttgtttgtaactattataatagtgtcttaaagcttttatagagtagagttctctagaaggaagagaagagaagggtttctctgtcttagtcactaggattttaaatgggtattagatttttgttcgtaatctagagttgattaaaggtgagtgttgtaagcttgtaagaattgaattttgtgaatagtgaaactctaatcaagtgttgattataagaaactgaatgtaacttctctcgttgagagatgaaccagtataaattcttgtgttgattgatttctttaatctcttcttatcatcttaatcagtgattcttttggtgaaatttcattactaaacaagtgaagattttagtaattgtattcttgaggtgagtggtttgattgtttgaagtattattggtttaattgtaataaagatcctattactctgattcttaaattttttttaaaaagaccaaatttaaaccaattcaccccctcttgattattgtgagtgtttatattgttttcaacgggagccactccccgttcaacttgatgattgtgctatgggggaggactgagagagaaactttgagctacactacgactacttcaacggcaaggggcttcgcccactacttgatgataccaaagtttttgctcggataaggattcgaccagctgctagagcatgttactcagatcaagatcaacagtttcggcagggcggagaatccgctaggtgacgatagctagagtcaataccaaacggtggaaatcactgagtctttggtagcaacaaagacgcattgtgccatgtgcaaggaagccttcgagctaggagtgttggcgcgtgagatgttgtgctagcacctctaccactccgattgcattctctcttggctctcaatgcggaacttgtgcctttagtgaggaggaggtggtagagttaaccatatggaggttgtcaaaccgacggattcaccgtcaggaggttcataaacgagaaccacttgtcgatggtgtacaactattttagttgggatacatgtgattttgtccttaactaccctaattaacgctacttaaacaatctacaaacaaactctatttctaatcgtcaaattgaaagcatttccatccaacggtattcaaaagtttctcaacttgaaaaataaaacaaaattttctatgatagaagcaattatagaacaaagggtcgtaatataactttaaagagttactcttaaataaataaatccttcccatatatatatatatatatatatgttagaaacaataaaatttgtacttaaaactttagaattacctaatgttgatgttgtatgtcagtttcgtattaattgtttcttttcctactttatagttttttggtgtaacctttcctgccatttattatcttgttgattttttttattagttttattatcttgttgataggagttcttattatagtgtttctcgatctttctttctctctttttgtctatttcaaaaaatcgttacttgtattaatagtttcacacttgcaagatgcaaccgcaagtttcaacagaatgatcaggacgcgtgagagaaaacattggccaaagttttaattatttatcattttatttgaattttagtggtttttttacactctattccttttgaatcttttgtctgttgcagttttatagggaagttcacattagatacagtaataacacaatttagtacgtagataattgataaaattggattttaactaaaaattaaaaaataaatatgctaaaattttttcccgatgtcaactaattatatatacgtgttcaataataattatttttgatagaaaaaatttattgttttacaaaataaacagtttttaattattaaataaactaaaaaaaataaactagcataagcacgcacttacctatgtcaaaagctttgaaaggatgatatagttggaagagttttttttagggattaatttgaagagtttaaactcattaggattttgtaaaattaattttaaattttaaattttatttttatacagtaattgattttttttactcaatatatttattgatttagttgataacttgatccataaaataaacattctaaattaaaataagagaaatataattgcataaatgtatttctgaaaaaaaaaactaaaaaaagtaaggcatttgtttcattttaaacaataacaaaaactgttacttttgtttccctctaaccatgatttgttatattatatagagcattcctaataaattttgtatgaagactccgcaccaaaactgttaaaaaaaataaaacatgtataaatttataaaaatgcacgtaggagattaaatattttttattaaataaaaacttatcagagcttaattttgtgaatccattaattatatttgataaaaaatatgtctatcttaataataataataataataataataataataataataataataataataataataactgaagttaattagctagtaattaacaaatttaaagtttcttttacgtaccaatttgtaaaagtaaacaaatttgaactgtgaaggagatttaatatacctttctttccttcaaacaaattgtattacttactcataatattttttaataaactatgtaccaaccagcgatgcagtttgtctctgagttattctattcaatatttacatatcctctcgcctttgaaaaaaatatttatacaacaatcacatgtttatgagtatggaaacggtttttagaagaagataaaattaactttactgattttttcattttaaagagtttttttactatccattagaagataatcttaattagtatacacgaaaaactcgtatatatatatatatatatatatatatatatatatatatatatatatatatatatatctaactaaatttcttttttaattaagatacgatttattctgttgattttttatcgataattctcatgagcaaagttgtgcgattatgatgattccagaattcaaacactttctacattgcacggttaaagtgccctttcattgtaactaattaatcactttacgtatccccaagttctttgaaatgacttggtaatcttggattctatttttgatcgattttatgtagtagtgtacttctttgaatattgcattatagtttttatttggcttaaatataatttaaatttatgataaataattgaattttatttgtttttaataatttttttatgtatcaaatctttaatatatcaaaatttttgttttaagttcttatcgattatcaattaagtatgacatgatattgttttacttgctaattatattggaaatatatgctcacaaagtgtcacataaacaattaattgactgtgatgactaaataaaagttttgatatgatttaatgtaacgaaaaaattgttagagacctaaacaaaattaattatttatgaggaatctgaaacttatttttaatctttttatatgtttttatttttatcttttgattttaacaaagtttaccccttatcttcttagcacatgtttggatcgatgcacatccagtacaatgaatgtgaaagctagttacatagcttctgcgtttttttttttttttttttcacttttgactcaaatttagaattaaaacatggatcttgatgatgaaacaaacaaactattaattgaagaaaaagtgtttttatatctattcaagccagcactttttatattgttttatgtttattaaataatttgataactattttatcactgaaatttaataactaattttaactaacaacttttagtaaaatttgtaatttttaattatcttatcagttatttttacttaactgatctttaatatgaatatgtttttatgaaaattgtgatgaatgcttcataaataatcatagttggagtcttggagagagagagagagaaaaattaagaaaacataacttacaaaatactatatatattatttttctctttccatacatcaattttaaaataattcatggttttattatttaatcttctttacccgtaatgtatgcgacagttaaactcttgacaatcaatttcagatttgtacagtcttcacctatgattggttgaggaaacttgactaatctcctactaattgattccccctactaaaattgcatgacacatgtacccacactatatatgtgtgtgcacatattttcaatcatatcaattaatatgggactttaattatattttcttttcaccgatatattattagcttgagttatgactaattgcatattctttaataaattagcttaattttttttcttctgtccttgaaacaaaaaaacacggcatggacttaatttgttacacatcactatcttaaactccaaacattaagatcctcctaatcgtttttactttcggggtaaaatccatctcgttgattttatattaccatatgtttcagttgcatacatattaactttccaagcttgcctcactaaattcaaagctgaatattgataggcacacgttaccccactaatgacatgtatttttctttctcggaaattttttggaagcaaagatgcctccgaaacactgaagtatggacaagttttcggtaaatgaatgaatgagaaaataaacaaatggggtttgacttctatgtcttagtttgtggaaacttcaaagtttttctaagttaagacatccaaacacgtcttaggtagccgtcaataatcacgcactcgtatcaaccacgaaaaggtgaaacagctcaacattcaaacatgagaaaatggacccattttttttttttatatagatttgctttgtttatttaattaaaaagaactgagaatgacttagccaacgtgtaaaccttccaaacgcgtgcataagtccatttagggacgcgcagttttaccacttcccactaatatatatacccctttcgttcctttccaaaatcattgtgcccatttcttcatttcttctcattacatacacaaaacccattttacacctttcacaaaagaacaatatctctagctatttgccaaactacacacatcatttagaaccatgtctttctctaccaaattgcctttggtccttttattttcatcccttttcatccatgcatctttgggtgagtacatcaatacatcattctactttccatgttttgttcatttttattttaatgatgagttttctcattagatatgatccatgtatctgacatcacctaacaagatatgacttttattcttgttattattttgtaacatttctcattacatgaatgaaataatactactatatgaattaacagctaaattttattgataagttttctcattaagtgtgatccatgtaaccactacaaaaaaaaaaaacggtatttccgacgccacatgatagatgtaagacttttgttgttgttattgttttaagttttctcatgacatgaatgaaatttatgaattggtaactgaaattcagtgataagttttctcattatgtgtgatccatgtaattgacatcacctgatgagataagatttttgttgttattgttccaagttttctcatgacatgtgtgaaatttatgaaatggcagctgagatggtgtgtgaggacctgccaaaggaagtgtgtgctttctcattagcttcatcagggaagaggtgtttgttggagaccgagaaggtggccgacggtggcgtcgagtaccaatgccggacgtcggaagtagtggtggagaggatggcagagtacatagagacagaccaatgtgtggaggcatgtggggttgataggaattctgttggaatttcatctgatgccttctttgagcctcaattcactggcaagctttgctctccagcatgttaccagaagtgccccaacattattgaccttttcttcaacttagctgctggagagggtaagaattgttcattgacaatgttactatcatcatcagtcatcacattcttttgtccaattcaacatactctaaaaattacttttcaacaccaaacgccaaattaaatgtttatttcaagtagcttttctctataaatccttataaaatgtcaaatcaccttacatatatagaaagagcataaaacaaaaataattcatattaatgacaaaaccatttatatgtaattgttaaaaataaattcactaaattttgtcaccagtatatttgttttttcaactagtataaaggaaggtgtagaaaaaagtgatgtaaaataatcataattaaaccatggaaatcattttgtaatatttctaatttccaaagcttgtatgcatgatcataattaacatgtttggtagtcttgtttttgaactttggttgcagaattggctcattaataaaattagtagtcgtgttcattaggtaacgtttcaatatatagagaaagaaaaataaaatagtgatgtctcttctgaataactcttctgcgtgttaatgcatgcgttgttgcttgtgatttcttaactaatacattaacgccatctcaaaactataaaagaagaagaaaaaaaatatgctggttaccttttcttaatcataaggctttcatgttctgctttttgtctcatgctttcaccattcactgtgaaagtcatacgatacctaataccctagaactagaagcctagaacattttaacttgaaatctaatcaaggtatatatatattgttcttataaaacaaagaaatagttaaaaagagttgcgcgtggcagaatatttgtatttttcttgtttgaatagttgatggagactctttatttagacatacttttctggatcaaaagttgtaccctcgttattatgtaaaataattttatatcattatttaataataaatcttaataaatttgttaacttttataataaataattaataattataccaatatgaatatatgattagataataatacaaaattattttaaattatcaatatataattagtaaattttattataaaactattttacattatcgttacataactattaaattttataccattacaaaactattttgtacagtgtgcataataattaaattttatattataaaacattttaatggccatttcaatagtacatagttgtcaaattttccatttttcttgttactataattactaattaccacagataataactaagcatgcttggatgtgatgcaggggtgtttttgccagaactgtgtgagaagcacaagaccaaccctcgtcgtgccatggttgagctggtgagctctggagctgcccctggccctgtttctggcgtgtcagaggacattactattgcatcagcacctgccccttctcccctgtaattttggtcccttgaaattccacttttcttttgcagaggtggtgtgaactgagcagcaagacatttataattattattattgttattgtgttactataatagaatatggaggatatattatggcttcatttttatgggttgggttccatttaatgtaataatcaggagtttggcatggagttgataggtttatgttatgtgttgttttccatgtttcttaaattttggaattatatatatatatatatatatttgtttgtgagctagtaataatgtgaattatgtctcaataattgaaaataacataatttaacaaagttaaatatttttttaataagtgtgaaatcaattttttatataagaaaacaaaaactagttaattttgttaatttgttatttcttattaaaaataaatattttttttattggaacttgataatgaacataatttctttattaaatgatggatattttaaacatagtcttatgaaataagacaaaagaaattgctttttacttatatttaaaaacaaaaatatgattttttttcttataaaaaactgaaaaaataagcttaatgctgcctaacaaaaggcttaattccgcaaagtgttccatatatgggttcatacttcaccattgatataaaaaatagtgataacaactcattttctatcataaatttttaatgttctaaaaattacatcgataattatatcaataaaaatattgatttacgacttcttagttccactgtggttaaatcatgatcatattgataacaattaaatctacattttaatattaataatattttaaataataaaataatataaaattgtaataatcaatatctaaaattataaattaagatcaataactaaaatttaaaatattaaaatacaagttcaaatattttaatttttattaatttttttaccaattgttatcggttcccaacaattttgagatgagttgattttcttagaggtaacagacgagccactagactagtttcgagttctattagttgaacatactgatctcgtctgatttttaaagaatattcttttcaacattctttctatcattagttagttattttataaaaaaagattacaaaaatgagagtcgttaaataagaaatgagtactttctatcattagttagttattttttaaaatagattacatagatgagaatcattaaataagaaatgagtccgataaaattttgtaatttttaataataaagaatgtgttaaaaatatatattcaaaaacttggtactcaatttttctttctttttctatgttagaaaatgaaaatatttcatagcaaagatcaagcgtccgtggtaaatcaaggacacttcctgcttacaattaatttatggttgagacggttctagattctactttggttgttattgttcagtaagacagatagggaatccaatcgccccttcactaagaaaagagccattaattaataacaattggcacttcatttttaaagacaaatatggaatcagatcctaaaaggctaaaatgactaataattaagtgtgaaaataaaacatatttggccaccttaccaacttggacttgacctctcagtcttcaaattggaataagaccttcaaaaattggaatttgacgcttgactagtctagaaatagaattccaccttctcatatcagttttggagaactgaaaacaagtaaagaaaaccctttgccaacacttaaatcaggacatcaaaattctgaatatatgaaaaaacaaattgagaagattaactacttctctaatttcacatcaatctccgacatctatttatttattattggaagacacttagctatatacataacaatgagttgattttttctctctaaatcatgagtatctttcactaaagataattatgtttgagtcggataaaattattatggacaacaaaactcttcttccaagttttttacacaattgtgtatcaaggactcaaattgaagatctgcttagtatcgagttgaattttatttggtataggataagatgattatattaaaaaaaaggtttaaaaaagatgttttttttgttcattctataatttaatccatgggcttgcattgtttgcttttttttttttcgtgatttaatccattgtttgttatacttgcatgtttgtttgggatcttgttttgtcgggtcattgtgtgatgttgtacaatgttgatgagttcaatagaaggagcaagccccacactcaaaatcatgaaggagagaggaaacgaagccatggtgttgtggaggacgtgactcgtggaagggtcatcagagaggggaatgagaatgagtagtagaaaagaaggagagagggaagacgcgaagagggaaaaaaagtttcaccactgtggagaatcagtcgtcggtgagaatggagcaaggatcgagtgttgagattccataataaaatcatggattattcattaatttaaagactattttcaatagtctgccataaaccatttcactattagaaaatgggttttttatgacgcacctttctaagatggttcttaaaaaatcgtcttagaatgttagacatgacaattttgtaaataaaaggagatgtacaatgatagttttataataaccgtgttaaaaggtgacagtttaatagccgtctttaaaataaaaaaaaattaaaataatattattaaattaaagcaagtgttcaaaattcttacccatttaggttttgctctccgcctgctctcattcaaagcctcgaagctccctctcctccatggtcggaggtgatccactacgacaagatgggccaggcctgctacgatgccttcgacttcgaccaaatactacagcagctgcaggttcacgtgccacagcttcttttcctccctcgaaatgccacaccaccaaaggtatgccatcacgcgctacctctacaccaccgccaacatcaacctccccaacttcttcaagcactccagctggtcgaagatgtggagcaagcacgctaactgggccggatacgtcaccgtttcgaacaacgtgaaaagcaaactcctcagctgacgagacatcatcgttgcgttccgtggcaacgttacgtgcctcaagtgggtggcaaacctcatggatttcttacttttgcatgttttcaagactgtaattttcagatatctcttctacaatttctcatggcaaacctcatgctttgctttggccttgagtgaaattcaatatttcttctacaatttctcattatcactacaaattctcttttgctctgtttggcaggattctgtttcagatttatctgtgttctgattttcattatttagaaaacaattttgattattttttagcggttttagagtgaaaagaaactcataaatcaccaataaatttgaaaagtacatagattcacactgcataggagggcaactagttattgtgtaaatatctacaattttatcgagatgcatatggttgacatcttttcaactttctttttgtcaaaagcaaagcttcttctgttatgtttgcctttgctgatgttttattgacagtactgtaactttatattccattgatttaatggtgtatcttaaccttaggaaatggtggagtgggagcgcaagagtaaagtacttggaaagatgcatgcatgtggtcatgatgctcatgtcactatgcttcttggtgcaacaaatattcttaaacagcatgaaaaagagatacaaatttaattttactattatttccatttcttttctctataatgttatgttatgcttttcccccttgaagtattgcacttcatataaatttaaaacgtgggggtgtcacaagccactcttcactactgtccaacatgctacctattcaagaaagctggccattttgacgatttatagtatttttatatataaaaaaatcattgtagaattccaattaattatgtcaatctttggtttctagtatattggttaattgttaatcattggccaaatgccatgccaactttgtaacttccaatcattctattatccgatatacatcttaagccttttacttttgtcgcaacctattcggccacgaaggggacggcgacgaaaaacagaagaatagttcccaaaaaatgggaaaactagatgggagtcgccaccaacgtttatttaaggaaaacgtcagaaaaaccaaaatataaggcatggtctacgattttagagaaaaaggattcgagagtcgtttatgcacggggaaggtgttagcaccccatgcgtccgtcatgaagaccgcctttaatcgagtgtgttaaaattaaagtgactttttaattatttgtttttccttaagaacatggcttatgcttgttttatttttgtttatttagaaaagaaaataaattttttttttagaaaagagaagattttatattttttttagttttttaggtcgataaggggtttgccctcgctcctacgtatccccaagtgcaatgaggaaatcagacttacgtagttctttataaaaaaaagcttgattggattgattttattttccccaaaagatttgtttcaattacatgaaaaagagccgttaaggcattggaccttgaaacgacgttgattttgaagaaaaagcggggagaatcgcttaaggcattggaccttgaagcaatcttgagtaatgtgtaattttgagaaaaaggagaattgagtaatacttcatttgggtatttttagctttttttagaaaagattttgaatttgtggtaaactctatgaaatcaagcaagtcggagacccagcatgatattcacaaatctatccacgtgttattgaaatattaccaagcgagtcggagacccagcatggagtgtgtaacaccccgtgtgcacctggtgcgttatccttaaacatatcagaatcgcgctaggcgcgccatatatataacggtgcggaaaccaagaatcgatttttcttgattacattatgtacggaaataacccatcaagcacaacattatacacatgcccttattgatccagataaaacctcacataaatacgctaaacataggcaattacatataactcacaacaaagataatcaggaggtacataacttatacaacaacataaatagttgtacatgacagagatcgatgaaactcttctagtcttcatccacagccctgaccctcttcagcacttgatgctagacatcctgctctgattgtcttccctcctcaggaaaacctgaaaaccacaaaacccacatagggtgagacaaacgtctcagcaagctcagggttctgggaaaacctcccttaccctggttcacctctacatatccatatagcagagctaagaacatagttctagctcacaccggtacatcctaggacctccgcctagattatacccattccagtcttctggatcataacacagggtatactcgtatcaggggtatcacaacacaagtagcactcactaaacacttttatatcggagaggcattgcctcaacacacaactaccttgcctgaacacttattcaggtcttatatacatatgctgcctggaactttagtccaggacttcatcatcaatcaaatactcagggacctcggatccctgttatatcacatctatcagaggattatccaaatatataggtacaaccatgtatggaggactcctatataacggtacacatcatcaatatcagtatacatctctgccctacattattcatactcattcacctgtagttaccccaggtgctatacatacggcttatattcaatacaatcaattaacttttctctttggtggtttgatgcttcgggacttgaacccgtagtcttactctacacccatctcatattgccttggttcctctgccaatgacttacacttgtcatgacaactaggtgctttgggacttgaacccaaagtctgcatctcttgctttgggacttgaacccaaagtctttctttcttgctttgggacttgaacccaaagtcttactcactatcaatacccatcactttcccctttttagggatcaatcatcaggcatcacgcatcaattacccttttatagggtacagatatccagccaacacagcatgctcataatcagcacatacatacatatcaatctccctttctcagggatcacatccatcacataatatcgatcctactataataggactctattctcctaatcagagaatatacaatcatagaccaccactatggtctttatccatatcatcatctatgcctaaggaggaacatccgtgagggtaatccacgcttaggactttaagcggagagtaatggcacctcccatggaatctcagctattccagggagtcctcaaactctttctctggctagggaacctcagctagcctgataccatcgcggtatcctatagattccatcacagatcttactcggatctgcatcacatcaagtcctggaacacattacagtgttcatccctcttggtatttatcctagggttcatccagcctattcggctgatacatacttattctcatcaatattaggccattacggcctttctctctcagcttacatcaaacccgcatatctatatatatatatatatacatattcttacacactacatatacccatcacccatttgggtggcaaacaagagagagaaagataacacagaacgatgagcttacctggtaaatcgtgcctgcaattccaacctctggaacgatggtctgctcctctgacacctcgtgtcaagccctaacaaggcaaccacacacatatcaccgaccattcaggcacataacaatatcagctcatcagacagcctcaactgtctctgagaaaggaacctcactcctttccaaaacataactcaatcactttacaagtgatcaactgacctcaacagggtctctctctcagcctatacaaggctacagagcctcctcaaaactctgatcaggctaacatagagcatctctctgctcacaatagccaaaacccaacttctcctaatcaccagtttcaaccggtcaatctcatctacatcctctcctgagcaactttgtcaactgctctaaggtccagactagtcaaatagtcgaccttttatctctgctcagactgcctcagagccaaaatcaaacttcatcaataatgatgattcaaggctctaaactcctcagaacagtcctctgagcataagactctacagagtccgagcctagtaacggctctaacacctccaaaaacacccctcaagataaccccaaaaccccgaaatccaaagcttagaaccaacagttagagctcgagtttcttacctctgtgatgctcagaagtaccagggaatcactttccctcagactactcgctcgatctaggcctcttttgcctctgggtctcaagctctcaggggttcgctctgagaaatctgatctcactatttctcagcttttctcaagaatcaatcgggggttttctctcctctcggggttctaatcactttctcagttgggtcggaggtgtttagatgaacgatagagaagatatgaagcttcctcactcatcaatggcttccctctctcttttctctctctttttccccttctttctcctccaaatgagctatttataacagtctgcccgactcgcggcgcctcaggcgccacacctggcgctccaggcgccaccttccagcacctctggcgccccaggcgccacatctggcgctccaggcgccagactccagagaccctggcgctccaggcgccactctccggaatacacagcgccttcagtgccgcaacccttacagggttttcttcttcttcttttcttaagctttcctcaaagacttctaaagcatgtttataattctttaacttatgcttaatccggcttaatctaggcttaatcacatgcttaaaataccgggcattacattacacccctcctttttagaattctgtcctcagaattccattaggctaacctggttctgctcaggacctacatgtcctcatagatcgtgtaggattcatcagattctctcaatctgattactctcggcttatccatcccattgtcaactgggatccatggcaactctcatgccattcagattactgggaggcaacctcctctccctcaagagcctatcctacacctatgaccacaaaccacctcggacacctctgattatccttattcactataaagggttatgtgtctggcacaatccttacactgactctgagctctcacaactaacattgatccaccggatctgctcgagtccactgaaccatctcaggttcaaaacactgtttctatctctttcctctgtccaccactagagtcctgtatcactggcctctacagggcctcaccaaaattcatggttcataaccactaaccaggaacttcatctaggcagatatctacccagctagtaccttgctcccaggtacactcacataactcattcttttggatctagatggtgcattccatcgggcactgatccgaggacaataggctatgtcaagcctctgctgggttctaatcttcctgaagtatgcctctcatcccgaggtacttcgtatctctgtcactaacccaatgacatactagacattgaccatatctacggttgtgccttacctcatccctggccatctgaatccctgctcagtgactacattaccagtccttaccatctcatgaaggacggtatccaccaactcatacttaggcaccataacaaggcttatctaactatcagccatgtgcccactcagagacctataactggtttacatagccctcttagccacctcttgcggctgggcttcgcaggcttccgctgcgccactctgatcatcatcaactgggtccctctaaaccagagacctgataatcctctgtcatagacaggcgcaacctctgagttactcactcagctcacagtcccagactattatcacacatggatcgcgtccatgctatccctgctcgagatctcaacatatgtccagcttctactggaacacatctcaagtacaccggccatccggcctggacctatcagtcctaaacacatacatgagcaagtaccttgctccatgtccacgatggactatctcaacgcctatatatctacggcggagaatccctcaaaccatcatcacgcaccatcactgcatgtttacctgtcaacaaagaggttatactcacggcatacagccatatatcacatgtggcaaccagaggctatatccgaatatgtaggaacatctccataccggaggctacgtctatattgcagggtcatctcatgtctcatctcaaactgaccaccgccgcttctcttgaagcgtaatactctccatacacgaatggaggcattatcacatatacctatacatatacatatcatgtatacatcatatctcgcctctggtcaagactctcacgactcatctggaacctctagagattctctctaactcgtggtccctctcataacacttttcacctagtggctctactcgccacatccacaacacaacagctgacccatagggcacacacccctatgatacttcctacaagcatcacagctaggaggtgcacctatactcggcaaacatcctctctgcccaagcctctcaaggcgattctatgctgaaggtaaaacctccagttctctacccttcatcattgggtcagaactcggggtctactaaccctcttcccatcaaagaacacaggttgttgtctcgacatctgctgagcatagccttatctgggtgacactatctcaccaggctgtctataccttgaggtctactgctggtcaccagcacctctttatcctctctgagtcttctccggaactcagccacgggaacatcccatctgacagggatctcctaaaacaaccatacttaaccagctcagcaactacagccaaacacgtggcccagtcatgtcttagactagactgtcaaactcggcctatctctactctctaacttccctgggaacatacttatccaggaagtaggcctccacatacgccaggtaagaatctcgtcctggcctcaacttaaccatgcggctgcggtcatctactacacgtgaacattacccggcagcacatcactcatacatcataacccctggtgatctggatactccatcaccacagggattctctatagcctgcagtcactttgctgcggcaactaatcatgtccatcatgcatagctagagggtcataattatgaacaagataaacatctttccttgggctgtaacaaccatctctgtctatataaggagcatatagtcccctctcaggtggcacctaccaacctgacggcgatcacattcgcccataactacaggaggtgggggaaacattctgtcacccctcctttaggctctgtcctcctctaacctcttatgatgagcctttatcaaggcctcatatctttctacctcagcagctctctgtcattacatatcctcctgaatctgccttatggccaccacagcagcctctactggatcagacgggcactagtcgctctattgttgtttctgaatctttgcatgacattgtacatgtacacaaacaataggttgatcaggcccacactagtgtattcacatacaatactcatgtcagatcaaacaacaataccaagcaacctctcattccatacataatgattctatcaagaaaccgctctgataccaaaatgtaacaccccgtgtgcacccggtgcgttatccttaaacatatcagaatcgcgctaggcgcgccatatatataacggtgcggaaaccaagaatcgatttttcttgattacattatgtacggaaataacccatcaagcacaacattatacacatgcccttattgatctagataaaacctcacataaatacgctaaacataggcaattacatataactcacaacaaagataatcaggaggtacataacttatacaacaacataaatagttgtacatgacagagatcgatgaaactcttctagtcttcatccacagccctgaccctctccagcacttgatgctagacatcctgctctgattgtcttccctcctcaggaaaacctgaaaaccacaaaacccacatagggtgagacaaacgtctcagcaagctcagggttctgggaaaacctcccttaccctggttcacctctacatatccatatagcagagctaagaacatagttctagctcacaccggtacatcctaggacctccgcctagattatacccattccagtcttctggatcataacacagggtatactcgtatcaggggtatcacaacacaagtagcactcactaaacacttttatatcggagaggcattgcctcaacacacaactaccttgcctgaacacttattcaggtcttatatacatatgctgcctggaactttagtccaggacttcatcatcaatcaaatactcagggacctcggatccctgttatatcacatctatcagaggattatccaaatatataggtacaaccatgtatggaggactcctatataacggtacacatcatcaatatcagtatacatctctgccctacattatccatactcattcacctgtagttaccccaggtgctatacatacggcttatattcaatacaatcaattaacttttctctttggtggtttgatgcttcgggacttgaacccgtagtcttactctacacccatctcatattgccttggttcctctgccaaggacttacacttgtcatgacaactaggtgctttgggacttgaacccaaagtctgcatctcttgctttgggacttgaacccaaagtctttctttcttgctttgggacttgaacccaaagtcttactcactatcaatacccatcactttcccctttttagggatcaatcatcaggcatcacgcatcaattacccttttatagggtacagatatccagccaacacagcatgctcataatcagcacatacatacatatcaatctccctttctcagggatcacatccatcacataatatcgatcctactataataggactctattctcctaatcagagaatatacaatcatagaccaccactatggtctttatccatatcatcatctatgcctaaggaggaacatccgtgagggtaatccacgcttaggactttaagcggagagtaatggcacctcccatggaatctcagctattccagggagtcctcaaactctttctctggctagggaacctcagctagcctgataccatcgcggtatcctatagattccatcacagatcttactcggatctgcatcacatcaagtcctggaacacattacagtgttcatccctcttggtatttatcctagggttcatccagcctattcggctgatacatacttattctcatcaatattaggccattacggcctttctctctcagcttacatcaaacccgcatatctatatatatatatatatatacatattcttacacactacatatacccatcacccatttgggtggcaaacaagagagagaaagataacacagaacgatgagcttacctggtaaatcgtgcctgcaattccaacctctggaacgatggtctgctcctctgacacctcgtgtcaagccctaacaaggcaaccacacacatatcaccgaccattcaggcacataacaatatcagctcatcagacagcctcaactgtctctgagaaaggaacctcactcctttccaaaacataactcaatcactttacaagtgatcaactgacctcaacagggtctctctctcagcctatacaaggctacagagcctcctcaaaactctgatcaggctaacatagagcatctctctgctcacaatagccaaaacccaacttctcctaatcaccagtttcaaccgatcaatctcatctacatcctctcctgagcaactttgtcaactgctctaaggtccagactagtcaaatagtcgaccttttatctctgctcagactgcctcagagccaaaatcaaacttcatcaataatgatgattcaaggctctaaactcctcagaacagtcctctgagcataagactctacagagtccgagcctagtaacggctctaacacctccaaaaacacccctcaagataaccccaaaacccccaaatccaaagcttagaaccaacagttagagctcgagtttcttacctctgtgatgctcagaagtaccagggaatcactttccctcagactactcgctcgatctaggcctctttcgcctctgggtctcaagctctcaggggttcgctctgagaaatctgatctcactatttctcagcttttctcaagaatcaatcgggggttttctctcctctcagggttctaatcactttctcagttgggtcggaggtgtttagatgaacgatagagaagatatgaagcttcctcactcatcaatggcttccctctctcttttctctctctttttccccttctttctcctccaaatgagctatttataacagtctgcccgactcgcggcgcctcaggcgccacacctggcgctccaggcgccaccttccagcacctctggcgccccaggcgccacatctggcgctccaggcgccagactccagagaccctggcgccccaggcgccaattctggcgctccaggcgccactctacggaatacacggcgccttcagtgccgcaacccttacagggttttcttcttcttcttttcttaagctttcctcaaagacttctaaagcatgtttataattctttaacttatgcttaatctggcttaatctaggcttaatcacatgcttaaaataccgggcattacagagtgcacgaagcataagcgagtactaaataaatacataacattacgtaatcaaataaataaaatggaaatagaaaatggataaaatagaagtgggggtacacttagtaattaggggtgcatacagtacaaagggagtgcaatcagcagtgcatattaaattacacaaatgggctaggtgtaacatcccaaaattttgggaattacagtcaattactagggtaaaatgttaatgagaggcagtataaaaatttagggaaaatgacgaaaatattcctggacattttgtaaatgaccaaattaccctcaggtattttagcaagatattttaaggaggaaattttataaatactcttggatgtttgaaaaatgatcagaacacccttagggtgatacttacagagatatcctgaacatttttggaaatgacgattatacccctagggtgagtggtgaaattaccaaaatgccctttaggtcaaaaaatgatcagatgactttagaaatttgtgggaaccccagtattggataaaatgattttagataacaaattattagcaaggttgatggcagagaaccctgaactagaatttctaggaattttggaagatcttttgaaaagagcttaatctaggctacctcagacatcagaaaattataggaaaagtatggacataatctataggattttctcttaattatgggaggaataagtgttccaaaagagttagtttagtaattttaataattaaatgcaagatggaccaataggaagcaagaaaaagccaattaagaaaacaaaagcataaaacaccttaacctaaggctattccacgtgagaaaagagaccaattgaggattgctttccaagcaaggaatccaacgtgcaacaagggagaagattgaagaatcttcaagacttggacacttggatggacaatattcactagccaatgataagaaaacaagtagaaagcaagttattatgactaaggaagatatttgcaccaacaaaagactaggaccggaaattaagtgggacttgagaggagtgtacgtgcaagaatgaatggagaagccttgagaatgttcaagaccatagccacttgtaaggaggagaatggctagccaatgagaaattaaacacatggaaagctagtaagatattttgtaataaaaatcaaaaccaataagcctataaaaagaagcaagaccgaaactatgggctggttggagaaaggcatacgtgcaacatccattcccaaaacacttctatttcattcctttctaattctaccatttacatagaacccaaaacaaaggcctaacccttggaaactcacgtgatgactagcaaccctaggagcaaggattattcaatttcaaaggaaggaagctgtccaaaagcttaaggaaagcaaggtatggggaagtttatgataagctatgtttgaatattaagcttcttagttgtttccataaagaaccatgccttgtatcctaggtgtttgatgaattgtctcaaagagcttgaatggttatttgactaagtaacttggttttagtttaacaaatgattattggataaataacttgaacctaatttaatgaatgaaagtaagaagtgaccgaaaattagaggtagtatgactaattttaagaaaatagttgtttagaattatagttattcaatagaatatgttgctataattttaatgtgaaattcccctaggttccttaagtatatatatttaattttatgctagaaattggttgataatatgtctatttaatcttagaattatgtggaactttataaaaattaatgtttaagtagctttctttaaaagtattctataaattcaagattgcacatcatgtgttacaataaataaaatatgttcaaaagttgtttatttgaatctttgttgttggatttgaattatatttgtatgattgaatgctttagtaatagttatttaatatttcatgtgttgttgagtgtttccatgaaagcacaccatgtgtttgatgaaatgttccaaaagaaataaagatgggtgaagtgttggaatccttgtgttgttaagtgtgttgtgattacttatggattccaagagttttgttgaaactttgtgataaaataagtgattgagttctttgacttgtctttgaagaatttatggagttgaattatggctgaatgcttagaatgttgtgtaaagctgtatgtgatgttgctttacgtgttgtttaaaaagcatatgccatgagttgtcaaagatgttgagctttgagatgtatgtgatatgagaagaagaataaataaatacgtgataaaaataagtcattcatgcattccatatgcatatgccctgcgggggttaagccgtgaagttgtttgtcagatagctgaaccgagtccatgcgttcagatgtgagatgtgagatgttctgaacttgggggtagattgtatcagtgaggaccacaccaccatgatgatcacataggtggaggtgaccttcctacgcgccactgcgctaccccgactgaatggatagatgtgccactgggatggggctatcttgactatggccatttgatgatgagatgttgagacaatcatgcatcatataaagaagatgagcatgcattacatgcatcacatgatgagtatgtggatgagtatgatgtatatttgtgtgatgatatgatttaatctatgtgctccgtaaatggtgtgatttaatttgtgggtgaattatgcgtatttgttattttataaatattattataatcgtttgtgtatattcttttatgtatgttttattcaaactatgtttgtcataaacttaccctattttgtgtctgtggttaacacctgtgatgaccccaatttattttgggcgagcagagaaacagtggagcataagctgtgaaggattttgaagaaaaaatgatgaagatatgttgatgagttgtactagatttaaattagttgtattttaagtttgcatgtatttggaattgtatgatgaaggatattttggactgtattactggactgtactctattattataatcaaaccgtggagagacaattcgttcatgatataaacgactaatagaatttgcaagcaaagcgaaaagaattttcatgaaatttataactaaaataattcttatacaaagtgggcatgaaatttcatctaaaatcaatcaagcacgagagagtaaaaggaggcgttacattaggcccagcagatatgggtgcatttatgaatatgtgggtttaaatagcattaattgtactgccacaaagtgggctaagtccaactgctgaagggtgtgcatttatataaagaatgaatgcaaacaataatatatgttttgttcaaaatgggcaaggcccaatagggaaatgggtgctgttatgaaaaggtgctgtaaataacatctcatgtttaatttgaaagtgggtcaggcccaacagaaatggggtgtgcagttataaataaggggtgcaaacagtaatacatactttctggaataggcctggcccaacagtttagggatgtgcagttatgaaaagaaaggtgcaaacaacattacatgttggggtgtgcttatgaaaatttgggtgtgcagaaagcattgtttagttggttttagggggtgtatttatgaaagctggggtgcaaaaagtaaaaacatttttttagggttgaaaccgggtcagggtgacccggcccaacccgtattttcgttgatgggcagagcagctgtagcaaagctgcactgaaataggttttaggcttccatggaggttttgtgtcctcctaaggtcaccaccatagggctggcggcgcggtggccaccatgcagggggtggagcatggaggtggcggcacctggtggtgattcgtggtggttcgcggtggtggttttaagaagattagagggctttaatacaagaggtggtggtcgtgcgcgtagtgtgcggtggtgtgcgtggcggtggctgtgatggtttatggtggtacgcggtggcggtggtcgcggcggtggtggaaacgaaaaaaaaagaaaaaaaggagaagagagggaagggaagagaggggagaaagagaggagagaaagagaggagaggaaggaaaatgaaaatacctctgaagacccctccccttccttcaacagcgccacctagtgtaaaagttgagtcctatgaaaatgtcaaagttgaggatgttgagtcctttgaaatgtaaaagaccgaggacgttgagtcctatgaaaatgtaaaagattaaggacgttgagtcctatgaaaatgtaaaagactgaggacgttgagtcctatgaaaatgtaaaagactgaggacgtttagtcctatgaaatgtaaaaagttgaggacgttgagtcctatgaaatgtaaatgactgaggacattgagtcctatgaaatgtaaatgattgaggacattgagtcctttgaaatataaaagactgaggacattgagtcctttgaaatgtaaaagactgaggacgttgagtcctatgaaatgtaaatgactgaggccgttgagtcctatgaaatgtaaatgactggggacgttgagttctatgaaatgtaaatgactgaggccgttgagtcctatgaaatgtaaatgactggggacgttgagttctatgaaatgtaaaaaactgagtatgaaatgtaaaatactgaggacattgagtcctatgaaatgtaaaagattgaggacattgagtcctttgaaatgtaaatgattgaggacgttgagtcctatgaaaatgtaaaaagttgaggacgttgagtcctatgaaaaaaatgccaacaggtagtggtacccaaaggcttaaacctgtaagaaagcaagaggttgactctctgaaagggtcacttatcccaaactggatcttgaagcatatgagttttggaatgcaaattgatgaatgaaaagaaacatgcgagctttgccttgaaatgtagtgaatgtgggctttgtacccagaaatgtaatgcgactatttgtgaatcatgaaaatgagatatgtcgaacttcaccattctaggatgagatgaaatttgaattgtgcactgctcataacattatttctcttttgttatactttttttgcttctttttttttttgttttttttttaaaaaatcatagattgactgtttccttctaaaagatgtgatgattcatgcaaactcatcctgtcttttgcaaatatctgcggagaatccctcagagtgtatgttttgtttgatttaattgcttggcaattttggaagatggcagtggagccaattgtcattcaatcaatcaactgaaatatcgattccagagtttgttcccctttcttttaactttgattactctgcacaacaagaaaatatcaagctttgggattgaccacatgaaccattgaaggatggcaatggatatttacactttggtatatgaccaagtgaaactttcctgatttaagatcatagagggatgccatgagtccatcgatcccattgaagcttgatgatatgggctgatcccaaaaggatttatgcaacaaaggctgtccttggattcgaaaggaaccctaggaactttgcatgagaaactgacgttgaatgaaccccaattgcctttgggcatcttccacgagctccttgttggccgagctttcttctcaaatgttcatttaagctaaaaaccagtgtgtatatgttccattccagaatccaaactgaaaagcagaattagtcttcccttgttccacatgggctttattaggcttgtaacatggccaggggttaagagggctatgaaagaaaggtcaaagaggctcaaagagtgtttaagggttacaatagagtaagaaccttgagcgctttgattcatttaagctttttgggttgggctttactccatttgtcttatgcattgacaatcattgcacttttgtgccttccttgtgaaatttggataacttttgtctctttttgctttgcttgcctttgacggattttctttctttaacatcattcaaggcccaaccctgagcttagtaaaccacatacatatgtcatttacattgcttttcctgccagtttggcggtggttcctactctagggtttctttttttttttttttagaaaacaattatacttttggctcggagtgggtagcaaaggataaagtagtgtttgggatgaagaaacatggtcatgtgtcatttcaaatcttgactagagacttttacagtttggattttgggataaaacctctgataaacaaacgcttgtgatttgttttctttatccttttttttacataccctaacttttgcctaggctgccctttcgggttttcaacctaccgggtaagaacttcttatttttccttaggttcgcttggagccagtgcgtggtgtctgtcattgcctcggtgtagggtttggaggtatctgttgttgtcgtctgtcatgcctttgtagcaagaagaaatgaatagaaaggaagaaatgaatgaaaagaagaaatgaaagaagttgtgcaggttctcgaaagagaattttcaagggtgagaaatattttaaagattttcaattgatagattaagtcaaatgactctcactattcacaaaacttttaagaaagacaagatgaggtcgcatgcatgcctgtatctattatttgatttgaaacacagtcaatcaatgtttattcagctttactcattgcttatggcacccccaccaaatgtgtagaacgcgcaaatttttgattcggcagacttggaggtcaattatggagcacaggtcacatggacaagcaaaccagtgacatatattcatattccagtgaaagttgaataaatgcaaaaacataatcgtgaggaaaatgaaagatgatggcatttaacgtcgcaattgttgtttacaataatagcataaacatgagaatcctaataagtccttggaaacgtccaaaagaaaacctttaaattgccccaagcatcaaagatagtatcgcttaattacatcagaattcacaggcgaaggcaactcttcaccatttatgtttgtgagtatcagtgctccacctgagaaagtattcttcaccataaaaggtcctgcttctctcttcaattcctatgtcttttgatcctctatagcactcacagaagaactcccatggtttacgagtgggttagcttacacattgggattgtcttcctgaaatttcagccaacctgcatcaaacaaattttgcaccttatgttttagagacatacaatgctcaatggaatgccccgggactccaccatgataagcacatgtcacatttgggttgtaccctcaagggaatggaggttgaggaatctttgctgggtttattgctaccattgcattgctaagcaaatatgggagtaagtcaacatatgatatcgggattggagtgaattctactggcttcctttctgcgaaattccttccttggttggtgttttggttggcattaggtcttggtagtgcaacaagtggattttgtggtcggtttaggggtggactttgtggttgattgggtgttcttggttgatagggtgatgggtaatgggtaaggctaatattggctgagtagtggtattgctgggaaagatattggtataggggattataaagggcttgtggaaagtttggccatgtgggaacaacaattacagcatgagcttctccctcattcttcctctcaccactcatatcgagtcctctattactagggttcatagaagcaacatgattaaattttcctttcctcagacctacttcaattctctcaccagcaaacactagatctgcaaaacttgaaggcatgtaacctaccatcttctcataatagaacactggcaatgtgtccattatcatggttctcatctctctctctgccatggggcgtactatttgagttgtcaggtctctccacctttgagcgtattctttgaatgattcattatctctcttgcacatgttttgtatttgcattctatctggagccaaataagaattgcattgatactgcctaatgaaggtatccattaaatccttccatgagcagacccaagagggtttcgggttagtataccaaataacaattgctccagtcaaactttcctgaaagaaatgcatcagcagcttttcatccttcgcatatgtccccatcttcctacagtacatcttcatgtggttcttcggacaagtggtccccttgtatttatcaaagtctggcaccttgaacttcggaggaatgactacatcggataccaaacacaattctgacatgtcaacaaagccataattttctcctccttcaatggccctcaacctctcctctatatgatcaaatttttccttcttggctacagcagaaggctctccccccatcacaaaatgtaagggttgcgatggtggttgatgatgagaagctccctgagcatttagcacagggacaccagaaaatgcctgcccttcaatagtatatcttggataaaccttgaaatcgggcaaagtgtggtcttgggttgttgcatgtgtttcttccatgacttgaggttgttgattctctgtgagtacgggggcagagttattgatattctcatcagaagcgtatacggcaaaagttggtgtataattaggaggcaagccatatggtggaaaagaatacttgttttggaccgagacgtaatgagggtcgtatgcatttgtcactgcctcacttccttgaactactacacctaagactagactactctcatgattggaattgggcagatgaaatgggtctgtaataccttgaattttaagcatgggattaagccttgtgactaggaaacataaccatgcattggatttttttcccaaaaggaagcttgaggaaagcaataggcaaattcggccatctcgcgcgatccgtgtgggatctggcgcaatccgcgcgggaggctcgagtcagggcagtgttttcggccatctcgcgcgactcgggtggggtatggcgctaattgcgcgggaggttcgaatcagggcaatgctttcaaacatctggtgcgatccgcgtggatatggcgctaaccgcgtgggaggttcgaacagatggcgcgatccgcatgggacatggcacgatccgcgggagactttcgggtcaaccttataaatagctcattcgggacaaaaattgggagagagagtgagccatcttcttccttgagtgtccagcatccattgatgaccggagaagctccatatcttctccatttctcatctaaacacctccgacccaactgagaaagtgttcagagcctcgagataagctagagaccgagctttattcttgacaagaggcggtaaacggcgagatcgagttttctaagggagtccttggaatcgaagaacccaaggtcgaaggaggcttggcatggacgagctaccttggggaaagtgattccctggtgtttcttgacttcatagaggtaagaaacttgaactttagccgttggctctgtgtttgggttttggttggattttgagcactttgagagctgttttggagatgttagagccgttattaggcttggaccctgtagagaattgtgttcagggggttgttctgatgaagttagagccttgagtcatcattattgatgaagtttgatttttggctccgagtttatgtatgagtagagaaaagactgattatttggctattatgaaccttagagcagttgataaagttgctcatgggatagtatagatgttttttatgagctgaattggttataatgagaagcttgaaattgatatggctagagcaaggatatgctttgtatttacctgaatagagtcttagaagaggctctggagccttggttaggctgagagggatgctgttgagggtctggaaatcacttatgaagtgattggttctgtgtcatatggaaaggattatagttcctttcgttctaacggcttagaaccgttattgataagttatgtgtttgctcttatgtaggacgtgagcttgatagttctggtggcggtgatcatgaggccgggagagtcggtgttttgcctagagcaggtaagctcttggttcttgtatgtgtgtcctttattgtgttccaccatgctccagagggagtgatggttctgatgtgagcaaatgcgtgtatatggaaattatatgttaaggtgattgattattgaattgtatgttgtaccctgtgatagggattgatgtgtattgatatgagatgcctgaaatgtaatctgaaccttgtgatgggagactgatgtttatggctatgaattgtctggcttatgatatgtgtgtggtggactattggaattgaatgtgaattctgtgaatgaatggaatcctatggtagtaggataaatgacttgaaattgagactgacctgttgtgagatgttcctgtgatatagatgtagcctcccgaatggagatgttcctatatacacagaggtagcctcctcaggcaattgtgttggatagattatgagatgtgcctgtgatatagatgtagcctcctgagtagagatgttcctatatacacagatgtagcctcattagaaagagatgtacctgttatatagaggtagcctcctatgtggagatgttcctatatatacagatgtagcctcagatagatatattgagatccaggcatgagatgttcctagtatatagaggtagcctcctatgtggagatgttcctatatacatagatgtagcctctgcaggatagtgatgtatgctatgattggctgtaggccgtgtgtatatcacctgattatcaacaggtggatgtgatttgatgagagataatgattaaagaaggggattgagattcctgaatgcatggtggacgtttgtgtgatttcctagaatagattctgagaatatgtctgaaagtgaaccaggggaaggaaataccttcaagggccctgagtttactgagattttatatctcacccttttgtgggacttatgttttgcagttgaatcttcaggaggagcagatagatcccaaggcaagaagcctgtgcagggatagttgctatttgtaaaccttaaggcataggtgatatgagcatgtggctctgatgttttgtatactgcctttggtttattttattttgtaccctgaggggaatgtatgtacagttttgtacttaaacaatgattttatgtctattcaccatattataatgtatagtggttatgtaagtgacatttgataacgtcactcttatattatgcttccaaattgctccactctgatgattatagttaatgatagtgattaaggtaggttaatgaccctggttttgtatggggcggtacattatggtatcagagcagttttggtagggaagcattatatatatggtgaattgtgtgttttgtgtgattgttctaggtgttcattatggttgttgcatgtgtgactgttgagagtgagcctgatcaactcacccttttatgtgatatgtgcagtaccatggtgaaaacccggaacaatagtggtgtagcgggggcagatgaacaccccgacccagtggtagccaccttggccgctatgcagcaggagatagcttcaagtaggcaggttaatgaggccttgatgaaggccaatgaggagttgatagctgagttgagatctcagcgtagagaggatagagcaccttctccacatcctgttcctgagggcgagggtagttgccaggtgggtggagctagccatcttgctgaggggcctagccatctcagaggaggatcttcacagatatatggcaaggaggagactattactagagggaggatgcttacaactttctgtaagcatgatcctccagtgtttcatggggattatgatcccttgatggcggcccggtggttacaggccttagaaaagatattcacagtgatggagtgttctaatcatcacagactcctttatgccacttatatgctacatggagatgctcatgagtggtgggttaccacatcagagctgatgagaggccagggggaggctatcacctggcaggctttcgaagcccagtccctggacaaatactttccgtgagatgccagagagcagaagcaggaggagtttgagactcttgtccagggacagatgtcggttgacgagtatttggctaagttcaatgagttagccaaatatgctcatttcaggagggagttacctgataatgaggtgcttacagctaagttccagaggggacttagagaggatattgaggagaggatagctggcagtggatcccgagatctggggagtcttgtcagacagtgtaggcaggtagaggacatgattagaagaaggagtggcagtcatcctattcctcctagtagacctgatgtgaggagggtgtggcgcgggtcgcgccacaggcgacgtggatcgcgtgggatgaggcttagaaaaccagattcttctctggtatcccacgtgggtcgcgtgggggtatggcgcgggtcgcgcggagtctcggcaggttcacgcgagtcgcgtgaatgttcacgtacctcgcgtggaaggcccgtaggtatggcgcgagtcgcgtggtaaacggcgcgagtcgcgtagtgtgttatggcgcgacgtgcgtggtttcgggcgcgagtcgcgtgggaaggtcggtgaagcttttataagaacgaaggtcgtgtttttcagagggaaaaaccctcctcctccttccccacggtcctagcagccattagaggcctccccaagctttctaggaccttatatcatggcctaaacactttctattggcctttgatcttgagaggagcccttgagagcgagaatccttcctccctattccctaaaaccccaagttctgagaaaccttcagagaggttgagagaactcgagattgaggaggaacggcgactacccacggacaccggagctaggcggaacgttccagaggtcatctgtgtcgccattgaggtaagaaactcgagtttctctggttgattttcagtttgggggttttgggtgaatagtgacccatctgtgtttgggctagaattagctctgggtccagttgagagaagtgtttagaatgatgtgaggaggaaggattagctttcaatttgtgaattggagaatgtgggttctggctctaggataggcatgggtgactgtggttgagtcacttgatttggaacatgccagagcctgaatgatgggctggtggtgcctgtgaggccaagggaacggagtccagtggattagaccgttcaagccctgagaaaccctgtggttaggggttgagtgagctgagaagctcagttgatggctgaggctgagtctgtggtgactctaaagccatggttgatctgtgtagaccactgagggtctatagaaaggcttgtggttagatgagcctgaggaaccttaggcaggtgacctaagttgatggagaggattgtgattcctttccctgaggcagggatgcctgcctgatgagcttatgtgttgttgaatggtctgtaatgtgtgttgtgtgccttgacagggcttgacacttagagtgtcaatgaagcagaccatcaagccaggagcagagctgtgaagttcggctaagagaggtaagctcatcgttctggggattcgtcccttttcccttggttgccaccctgatgggtgatgtaatgcatgccatgcgtgtgtgagcacatgtatatatgtgtatgtgggcatgctgtttggatttgaaggccatgcggcctatgtttttatgatatatgctatggcctagtgtgtgctaggctgaaatggatgaacgctaggatagtcacctgctatggtgaggctaatgagacacctgatcagtcaggtgtaaggccgtgggccatgtgagtggatgcagaccatgagatggtttgtgatggaacctataggataccgggctggtatcgggctagctgaggttccctagccagaggaagggcttgaggactccctggaacggctggtattccatgggaggtgccactgctctccacttaagtcctaaggactgatggaactgtgtgacgttcctccttaggcagagatgtgagaaagtcctgagcataggttctcaggcagatgtgtttgaagtcctggacggttatttccaggccagtgtggataagtcctgtggatggtgctcccgtagtggaatgacttcccaggcaagtgatagtgacctgcggatggtgcctcctgtgtgagatgacttcccaggtaaaggaaagccggtggatggtgcctcctgtgtgagatgacttcccgggtagtggtatgacctgtggatggtgcctccgtcgtgagatgacttcccaggtagtgagaagccctgtggatggtgcctcctttgtgagatgacttcccgggcagtgaaagtcctgagtgctggtgcctcctgtgtgagatgacacctcaggccagtagtggaaagtcctgagcgacggtgcctcctttgtgagatgactcctcaggccagggttggaagtcctaagagacgtgtgcctcctgtgtgagatgaactctcttaggcatgggggtttaagtcctgaggatggtgcctcctgggtgagatgacttcccaggcagatggtaggaagtcctggatctgtttcccaggccagttagtgacagatatgttgtatctctaagagagggcttctcaagggggagaagagcctagagcctcttagatgagccatatctggatatatgaagtcctgagtaatagtcctcaggcattaaatgtttaataggagacaggctacgaaagccagagttagatggctgggccaggggcatggttgagaccccggagagatggctctaggagccagtgagaggtgtagacctcagatgccatgggcatcctgtgttatgatcccagactgctgggagtgtgtgtatgagcggagaatgtatctctagctcttttctctgtttattttatgtcttggtggtgaaccagggtgagggaggtttttcccaggaccctgagcttgctgagacgtatgtctcaccctgtgtggggtttgtggttttcaggtgcttctgctggagcagagaagcgacctcagggcaggaggccctagtgaagatatcaggctggaggaggctgcagttgacgaccggagctggtcttagttttgggttagagcagggtgtgtgtgtacacccgatttctgtacatattatgtaaatgaccgcctgtggtcatgtttttgagcatgtatatgtacagtagttgagtttgtgtatgttatgtttcctcctgagtatatctgtataagttatatatatctgcctattatgtgtatgttttatctggatcagttctgtctgttttatgctttagttgtgtttgaaaattcatacataatgtaatcaagaaaaacgatcttgtcgcttccgcacaccgcatgtataacgcttttagcgtgatttggtatcattaatgttagcacgtccggggtgttacaccagtagtgcaggcccagctgagaagggcaagggcaaagatctgagagtttcttcccctccagacagatttaagaggagtcatagaaataggccaccgagaccaggtctaggtcccagatgtactgcttgtgggaggactcactggggtgtgtgccctactgggatgttggtgtgctacagatgtggcaagcctggccactttgctagacagtgtccccaggccaaagagtgggccatagctgcacctgtgatttcaacagcacctaccacaggccggatttatacagttgatgcaagggaggcagttagagctccagatttgatcagaggtacagttttaattggtatgtgtgatgtgagagttttatttgattctggagccattcactcgttcatcagtgatcacactgctctaggactggacttgcctatgtccagactttcttctcccatggaggtgaccacagcctctagagagcagtgtagagtggagagttgttgtagagatgtgcactttctgtatgatggcatggagtatagtgtggatctttattgcttggccatgcctacccttaagattattttgggtatggattggttaaccagatacggtatcatgttggattgttgccgtaagagagtggttgtgtcttcagatgatgttagcccgagttcagttgcattcctctcagtgttgcaagtctgtaaggagttgagaggagaagctcaagggtatctgttgttgagtacagtggtggagagacagggagtggatatgtcagagattccggtggtaggcgagtttgttgatgtgtttcctgaggagattacacagcttccgccggacagggggatatagttctccattgatttggttccaggtgtgggacctatatccatagctccttaccgcatgtctcttttagagttaaaggagttgaaggcacagattgaggacttgttttccaaagagtttatcagaccgagtgtgtcgccgtggggagcaccggtcctctttgtgaagaggaaggatgagagtatgaggctatgtgttgattacaggcagttgaataaggttactgttaagaataagtatcctctgcctcgtattgatgacttgttggatcagttgaggggagcctgtgtgttgttctccaagatagacctgagatccggatatcatcagattcggattaagcccagtgatgtaccgaagacggcgttcaggttgaggtatggtcactatgagtttcaggtcattccttttggtttgactaatgccgcagcagtgttcatggattatatgaacaggattttcagaccatacctggatcagtttgtggtaatgtttatagatgatatactgatctactctaggagtcaggaggagcatgctgagcaccttagaactgttttatagattctgagagatcatcagctgtatgctaaattatctaagtgtgagttttggctttcagaggtgaaattcctgggccatgtgatttctgcagctggagtatcagtggatcctagtaaggtggatgctgtgatatcttgggagaggcccaagagtgtttcagaggtacgtagtttcctcagtctggcaggatactataggagattcattcaggggttttcacagatggtattacccttgactcgccttactagaaagggtaacccatttgtatggactcatgaatgtgaggagtgctttctgaggttgaaagaaaagttgaccacagctccagtgttggttcttcctgatcccgagggacgttttgaggtatactgtgatgcttccaagtggggtcttggttgtgtgctgatgcaggagaagcaggtagttgcctatgcttccagacagttaaagccacatgaggagagttatcctacccatgatttagagcttgtggctattgtctttactctaaaggtatggaggcactacttgtatggtgcccagttggtggtgttcagtgaccacaagagcctcagatatctctttgatcagaaagagctgaatatgagacagagacgatggatggaattcctcaaggattatgagtttgagttgagataccatccaggcaaggcgaatgttgttgctggagccttgagcaggaagcatgtgagtgttgcctgcatgatgatctctgactgtgagttgattgagcagttcagggatatgcatctgactgtgactgagggcactagtggtcttgagctgagtaggaccaaggttgataatgagttaatacagaggatccgagaggctcagaaacagaatgattctatgacaaacctgttgggccagcaggagtttagctgggagcctaatgatttgatgatgtaccaggatcggattgtggtgcctaagggcgagttggttaatgcagttctggctgaggctcataagggccagtttagtattcatccaggtgctaccaagatgtatcaggacctcagaaagaggttttggtggccagggatgaagagagacatagccgagtatgtgtccagatgtttagtatgtcagaaggtaaagattgagcatcagagaccatcaggtttacttcagccattacagattcctgagtggaagtgggacagcatttccatggactttgtaattgggctgccgaggatggatgtgactccatctgggtgattgttgatagactgaccaagtctgctcatttcttgcctgtgaggactgactacactacagagaagttagctcggctatatgttagagagattgtcagactgcatggggttcctgagagtattgtcagtgatagagatcctaagttcacttccaggttttggggtgcacttcaggaggcgtttgggacccagttgagactcagtacagcttatcatcctcagacagatggtcagactgagaggaccatccagacattggaggatatgttgagagcctgtgctttggagcaaggtgttaggtgggataaatatctacctctggtggagttctcatataataacggttttcatgcgagcttgggcatgactccttatgaggccttgtatggccgaaggtgcaggactcctgtctgttggtctgaggtaggtgagaggcagctgttgggacctaatatggttcaggagacttctgagcatatcagattgatcagagataagttattgagagctcagagtcgacataagagtttctatgatcataaacacaggccgttacagtttgaggagggtgaccatgtatttctgaggctgtctccagtcaccggggttggacggacgttgggtgtgaggaagcttagccctagattcattggtcattaccagatacttcagaaattaggaccagtggcgtataggctagctttgcctccctagttgtcagggttgcatgatgtattccacgtgtcgcagctcaggagatatgtatcagattcctcacacgtggtaaagcctgacactgttcagatcagagagaatttgacttgccctactcgaccagtgaagattttggaccgcatagagaagaagatcaggagtaagaccattcctatcatcaaagttcagtgggatggcaaatcacctgaggaagcgacttgggaaagagagcaggagctgttacaactgtatcccgagttatgtgccaggtatgatcttaattttgcggacgaaattctaaaaagggggggtgtaatgtactaccttgaattttaagcatgggattaagccttgtgactaggaaacataaccatgcattggattttttttcccaaaaggaagcttgaggaaagcaataggcagattcggccatctcgcacaatccgcgtggggtctggcacaatccacgcgggaggctcgagtcagggcagtgttttcggccatctcgcgcgacccgcgtggggtaaggcgctaaccgcgcgagaggttcgaatcagggcaatgctttcgaacatctggcacgatccgcgtggatatggcgctaaccgcgtgggaggtttgaacagatggcgcgatccgcgtgggacatggcgcgatccgcgcgagactttcgggccagccttataaatagctcattcgggacgaaaattgggagagagagtgagccatcttcttccttgagtgtccagcagccattgatgaccggagaagctccatatcttctccatttctcatctaaacacctccgacccaactgagaaagtgttcagagcctcgagataagctagagactgagctttattcttgacaagaggcggtaaacgaggagatcgagttttctaaggaagtccttggaatcgaagaacccaaggtcgaaggaggcttggcacggacgagctaccttggggaaagtgattccctggtgtttcttgacttcacagaggtaagaaactcgaactttagtcgttggctctgtgtttgggttttggttggattttgagcactttgagagctgttttggagatgttagagccgttattaggcttggaccctgtagagaattgtgttcagggggttgttctgatgaagttagagccttgagtcatcatttatgaagtgattggttctgtgtcatatggaaaggattatagttcctttcgttctaacggcttagaaccgttattgataagatatgcgtttgctcttatgtaggacgtgagcttgatagttctggtggcggtgatcacgaggccgggagagtcggtgttttgcctagagcaggtaagctcttggttcttgtatgtgtgtcctttactgtgttccaccatgctccagagggagtgatggttctgatgtgagcaaatgcgtgtatatggaaattatatgttaaggtgattgattattgaattgtatgttgtaccctgtgtagggattgatgtgtattgatatgagatgcctgaaatgtaatctgaaccctgtgatgggagactgatgtttatggctatgaattgtctggcttatgatatgtgtgtggtggactattagaattgaatgtgaattctttgaatgaatggaatcctatggtagtaggatagatgacttgaaattgagaaagacctgttgtgagatgttcctgtgatatagatgtagcctcccgaatggagatgttcctatatacacagaggtagcctcctcaggcaattgtgttggatagattatgagatgtgcctgtgatatagatgtagcctcctgagtagagatgttcctatatacacagatgtagcctcattagaaagagatgtacctgttatatagaggtagcctcctatgtggagatgttcctatatatagatgtagcctcagatagatatattgagatccaggcatgagatgttcctaatatatagaggtagcctcctatgtggagatgttcctatatacatagatgtagcctctgcaggatagtgatgtatgctatgattggctgtaggccgtgtgtatatcacctgattatcaacatgtggatgtgatttgatgagagataatgattaaagaaggggattgagattcctgactacatggtggacatttgtgtgatttcctagaatagattctgagtatatgtctgaaagtgaaccaggggaaggaaataccttcaagggccctgagtttactgagattttatatctcacccttttgtgggacttatgttttgcagttgaatcttcaggaggagcagatagatcccaaggcaagaagcctgtgcagggatagttgctatttgtaaacgttaggcatagatgatataagcatgtggctctgacgttttgtatactgcctttggtttattttattttgtacccagaggggaatgtatgtacagatttgtacttaaacaatgatttatgtgtattcaccatattataatgtatagtggttatgttagtgacatttgataacgtcactcttatattatgcttccaaactgcttacactctgatgattatagttaatgatggtgattaaggtaggttaatgaccctggttttgtacgggtcgttacagggtccatttcagtagcagtactgccagcagcagcagtggcaacgttgacttccatcatcttcctcatgctcatcatcacttccatcattgttgccatttcatagcctccatatcagccttcatttgttcccgaacttgttctatgtcactcattattgtagtcttggcatgcgtctggtatgggtgccgtaaagcgcaatctttatttcttggcacaatggttacttttttttctgatttcaaggaaagaatgtaatgagcgatgtataacaatgcgacaaaacaaataaacatggatgcatgcaaatgataacttgctgaagtattgcgaattttacacaaaacactcaatagagcataaggtcaaatcaacaattttcatgaaaacaaaattttcattacatcttatcagggtcaaagtacaactggaaataaaacacagacacatcaacggttcttaattatttaagtcaatagcttaaccatgtgcgagcaatagtcaaagagactatgaaaacctgatccatccactgccccaactttcgcaagctggctacttccggactttttaccttgacttgataaaacattttcttgaaagattgcgtttggttcaaccccatgttccaaggagtagaaatttttatcttcaatacttcgacaatctatcatagaggagatatgatgaatgagtatgacatacttacgttatgcatgatagatgtatttatgagcttaacgcaagacgcccggaaaaatcaccccttcttgctatcaaatgtgttgggtaccatgttcatgtggtctttgatgacttttaagaaaaaaaaagtgtataacctcgacatgggttggttatggacatgaccatggtactcaacacacgtaaccaagaatacggtgtaagctttcgtgcttcattgcgacttttggcaacacagagtagaatgcaagacatgaacaaatatatgtttgaatcatgcatgaatgaacatgggatgcaagtgatgacgacaaaatgtatgaaattgctgggacaagcaacaatctatatgaatatctataaaaatgcaatgacttatgtgatgcatgaatgtgacaaatgatgaatgcagagatgatgtccatcgtaatgctataaagagacatgatatgatcaaggacacaaggtggggtgagtatgctccgtgcctctaatttaggaacctagtggaaagggtgttgttgtcgcgattacgcaaatacgtttatacggcaagtgcaccgatcgtttaacaagtaataaaagtgtaagtagagtatcgtctccacagggattggaaagattttgcaataattgtaaaagttgtgattgaacaagaacagtaaaatacgcaagagtttgttggatgattgtattggattgagtaaagaatttaaacaaagcagtaaattaaaatcgaaagattaccaatgagaagtaattgtggtcaggcacaatcccttataagtatcacctccttcaattgtctgatagtttatctttaagtttacataagacaagtctctcctaatttcgtaaatcctagactcttaagagcattaactagcgatttcaccctttaattcgatcaagaaccctaaccttctagcgattctgtcaaactaagaagtcaaagaacaaatcttatgggttcgtgttatgtttattcggagaataagtctttcctattttagctaatccctaatgccttagtgaattaaccctttgaactgatttcataacctaatgtcttagtgaaactagtcaatccaagtaatcaaagaacgtattatacctccgcactcatgcatccctatgtctaggtgaagaacaagtgttaatcttaacaggtctgatattataattccaacgtgtccattgcgaaatataactctctatacctattcagagtgatcaattctaaacaagattatgattaagcatagaaaagaattaaaataaacataacatatgcatttaataccagtcaatttacagagggaaaactcataagttcatggcctttccacaacaaggagattagctagccataggcctcaagaacaccaaagcgattggatgaaacatgattctgcagaattggcttcgatcttgaatcctagggtttaccttcaataataatattctattctaagtgtaagtatcagagtatattgtaaagtctcccctaaaaactcagaaactctctatttatcgaatgttttaattacagtaactaagtcaggctttcatcctattttcgtagcaaatatcttcttaattcaggcaagaaaaacgcagtcacgcaactcgcgcgcgacaccacgcgactcgcgtgacatggcagtagagaatggcgcgatgctcgtggtagctgaagtggctcgcgtggcttcacagagttgaattgcttatcctttgaagtattcacgcgactcacgtgagttctcacgtatgtcgcgtgggaggtcagagctgaaatggtttatctttgagtttgtcacgcgactcacgtgaaacatggcgcgtgtcgcgtgatcctttctggacatccaagtgattcgcgtgagttgtggcgcgatgcgcgtgaggctccagacattgttttcttctttatttgctctcaatttcccttgttttgacctgcaaacacttaattggtattaaaatgctttatataacataatatactaaatatgcttaattcttatactattttctaacttatttactctaaatatgacctaaactaatgctatatttaagatgtgtttgcaacacatcaggtgtaaaagtccactattcaatgacaactttcaagtgtaagttcatgtaacctcaccggcttctagagatattgtcctcttatgtaatgacaatgcggagatagggactaccagcggcaatgcaccacaaaaagaggaaaactctagatgaggcttcactgtcatcaagtgtaacaccccttgtgcacttggtgtattaacattcataatatcagaatcgcgcttaaaacgttatttgaaaactttgcggaagcgatcgaatcgtatttcttgattacattatgtatggaatataaacacatcacacatacacaaacatcaagcatcataacaacataatacacacccctgctgatccagaatcacatacacactcataggcagataaccagaatatctcacagatataatcaggaggaacatcttttcattatatacaaaagttatgtacatcatcatcagtatctaaaccacctctatggttatacaaaagaataacttccctcacacgagggtataaaactatacatatcatgggtgtacacacactctttcccttctcagggaatacaaaaccaaatcaaaataagactgagccttccagctctccctgctgccacccggctaagcacacaatgtctctacaagggcctcctgccctgagactgctctcctctgccagaagagtcacctgtaaacatataaaccccacacggggtgagatacacatctcagtaagctcagtgttgcgaacacgacaagtgcaccgcttgtttcaagtaataaagtgggtaagtagagtatcgcctccacaaggattggtatgaatttcacagtaattcacggtctaagtaattggaagtaaaaagaaagtattttttgaagaatttgttgttgtatgttgagtgttgaaaaataaagatagaaattaaaaagattaaattgcagtaaattgagttgaagtgttaccaatggaaggaataattgtggtcaggcacaatcccctttgttccctacttcttcacttaactggttatcaagtttgattgtttctgattacccagagaataaatcttttctaatttagctaatccctaatcccttagcgaattaaccctttaacgtgaatcaaaaccccaatcccttggtgatttctatcaagctaagcatttaaaagactatatcatgaggttctgcaatcacgcatccctatccctaggcaatgaacaattgttatcttactcatgtcaaaaattagaaccccaacatccctattgcgaatcctaaccctcagaacttaaatagaatggccaattctaagaaagagtaaaacaattgagaacagagtaaaataaagcaatcataacaatctcattcaataccagtcaagttacagaggagttcacattggttcttggcataaccacaatacaaagtttagccggacataggcgtcaagaacacaaaagctgttgattgacacatgattctgcagtaaaccttagccttgattctatgtaaatttgatttccaaaggtgttttaagctcttgaatcctaatgaatggtgtttttctttagttcagaggcttccttttataattgctttgaagatggtttaattccagtaacaaggacccttttcctctgcattttcgaactcaatctttttaaattaggcaacagcatcttcgccgcgcagatcacgtggaattccgcgctgatcgcgtgggtgacacgagttgagactgccttcagaccttctggcgctggtggcgcaagtttccgcgctgatcacgtggccttcatgctatccgcgtgaaaatccatgctaatcgcgtggatgcttcgagttggaaggctgatcttgagcacttggcgctggtcgtgcggccttcacgctatccacgtgacttattcgaatttgaagcttggcaatttccattgtggcgcgaatcgcgtggtacttggcgcggatcgcgcgggaccttcagcttggtttccttcttcttttggcttgaaactcctcctttttatcctgaaataaagctttggcaatgaaatgatatcaatttagatatgaatgacaattaagctaattctaacctatattcctaattattcaattaaattctaacctaaaactagcctaaaactaagatgtgtttgcaacacatcactcagggtccttggaggtatctcctccaccctggcccactttccatgacacacacaagggcaatcacaatcacattggccacccggctcggcctcccggccctcataacaatatgagcaagtcatcttgctctatgtacggcggataaacatcaacgcctacctcagtgtgagactggaactcacacccgtgccatcccatcgggagctatcccttacgcatggacgcatgtatatggtacctccgagaatagaaggaatgtcccatctcctatctcttggtcttgagggatcaccgatccctgggataaacatcaaccatgagcaaaccaactaggaggaatgtcccatctcctagggaggtccatatctatcttactggccagaagatctaatcacaggcatcatacatttttcaagcatagatgcagcatacatatcattatgaggatgcaacaaccacaatgcatgcatcatgaatgcaaccatcactcctccggagtgtggtggagcacaaacaagcgggaaacatccttagggaccaagaacttacctggcaaagctgagctctgtagttctttccctgctctgtggcccacgccaccgacaccctcggtgtcaagccctaatcaaggcatatatgcacaaatcaaaaccatttcaatcatacaaccaacatatcaagaagtcctctaacttaaggtttctcttagcccagcacacactaggcttctcacagaccctcaaaggtccatcacaacttaattacggcattagagtctacacagactcaatacaagccaaagatagagagctctaagctctgcacaactcaaaacccagaattccaatatagcttgaacggtccatgtcactcataagacactgttcatctggcctctcaggcaccacaagacccccaacaaggctcttgcatgtcataacaacatcaacaagtgacccaacacaagtcacacatgccttcacagagccaaaaccaaagttcaccaaatcaaaatctgaaagctaatacttcatcactaaaccgttctaaacatgtttctctgaaggacccatggctaatactagtcccaactcgagtgggtcactattcacccacaaccccaattcttaaaacaaccggagaaactcgagtttcttacctcagaaatggagaggaaagcctctggacctctatccttagctcgggtgttcgtgatacgccgctattcctcgcccaaactcgacttctaagagtttctcttgcaaaggaaactctctgatcaaggggttttaagggataaagatgaaggattatcgctcactagatgattctcacaagtttgcttcttaaaggaaggtgtttaggtcacaaaacaaggctttaggaagcttgagagcctcaggaatggtggaagggcgctggagaagaagagaaacagtttttctcttcaaaaatcgcgtttttggccttttatactggacctgaccgacatgccgcgccaatcgcgccactccggcgctgatggcgccaaaatccagtgcatctggcgcccttggcgccactttggtgctcctggcgccaattttcagcatctgtggcgctcctggcgccactctgacgctgatggcgccaatatccagagtatctggcacccttggcgccactttggcgctcctggcgccaatatctagcatctgtggcgctcctgacgccaatatccagcatctgtggcgctcctagcaccactttagcgctaatggcgccaaaaatcgtgaaaaatagccttcagctacagtgccacgctcggagcgccagctacagtgaaaataatattatttttttatttttatttttatttttatttttatttgcaaaactttggttattatatcaagcgagccagagacccagcatgaccacagatcgacctccactccctatggcttacacagacctgggtatagggcccaatatctcaaaatgtgtgcaaaaagtgtatgtgttgtgtgtgaacagagcatcctaataattacccaacctcacctgcaaaacaatcagaaaactcccaagcagatacaacaagtatagcacatgtcgtctaccctaggattcaatgaccccgtttatttctaactacaaaggcgtaacaacatagcaaaggatatatatatatatacaagcatgagcaagacaaagaataaaaaatgagatagaagcaaaacaaccaaaagaacggtagcagagtgaaacgataataaacagaagcacaacgaaaagaagaaaaaggaaaaataaatcacgagaaagtcacgataaaattacacacacgattaaatggcttaactctctaaccagtccccagtggagtcgccatctgtcgcaacctatccggccaaaaagtggacgatgacgaaaaagagaagaatagttcccaaaaaatgggaaaactagatgggagtcgccaccaacgtttatttaaggaaaacgtcggaaaaaccaaaagataaggcatggtctacgattttagagaaaaaggattcgagagtcgtttacgaacgggaaaggtgttagtaccccacgtgtccgtcacgaagacagtagcctttaatcgagtgtgttaaaattaaagtgactttttaattatttgtttttccttaagaacatgacttatgctttttttatttttgtttatttagaaaagaaaagaaaatttttattttttagaaaagagaagattttatattttttttagttttttaggtcgacaaggggtttgccctcgctcctacgtatccccaagtgcaatgagaaaatcagacttacgtagttctttgtaaaaaaagcttgattggattggttttattttccccaaaagatttgtttcaattacatgaaaaagagtcgttaaggcattggaccttgaaacgacgttgattttgaagaaaaagcggggagaatcgcttaaggcattggaccttgaagcaatctcgagtaatgtgtaattttgagaaaaaggagaattgagtaatacttcatttgggtatttttagctttttttagaaaagattttgaatttgtggtaaactctatgaaatcaaacaagtcggagacccagcatgatattcacaaatctatccacgtgttattgaaacactactaagcgagtcggagacccagcatggaatgcacgaagtttaagcgcttactaaataaatacataacattacgtaatcaaataaataaaatggaaatagaaaagggatagaatagaagtgggggtacacttagtaattaggggtgcatacagtacaaaaaggagtgcaatcagcaatgcaaattaagttacacaaatgggctaggcccagcagatatgggtgcattatgaatatgggggtttaaatagcattaattgtactgccccaaagtgggccaagtccaactgcggggtgtgcatttatgaaaaaaatgagtacaaacaacaatatatgttttgttcaaaatgggcaaggcctaatagggaaataggtgctattatgaaaatgtggctgtaaatagcatctcgtgtttaatttgaaagtgggtcaggcccaacagaaatggggtgtgcagttataaataaggggtacaaacagtaatatgtactttccagaataggcctggcctaacagtttagggatgtgcagttatgaaaagaaaggtgcaaacaacattatatgttggagtgtgcttatgaaaatctggtgtgcagaaagcattgtttagttggttttagggggtgtatttttgaaagctgaggtgcaaaaagcaaaaaaaaatttttagggttggaaccggatcagggcgacccggtccaacccgtattttcgttgatgggaagagcagctgcagcaaagctgtgcggaaatagggtttaggcttccatggaggttttgtgtcctcctaaggtcaccaccatgagctggcggcgcggtggccaccatggagggggtggagcatggaggtggtggcacctggtggtgattcatggtggttcgcggtggttcaccatggtggttttaagaagattagagggctttaatacaagaggtggtggtggtgcttgtggtatgcgatggtgcacgtggcggttgctgtggtggtttgtggtggtacgtggtggaggtggccacggtggtggtcgaagctggcgtggtggtgttggaaaacaaaaaaaaaaaaagaaaaaaagaagagagggaagggaagaaaggggagaaagagaggaaaggaaggaaaatgaaatacctcaaaagacctcgccccttccttcaacaacgctgccaagtgtcacaccgcgattggtgtgttttctctctttgggatccgtgcctccctctctctacaattaattctccccctcactgttgccttttttagtgcctcttataatgtcactattttgacctaatgggccttgtggccttgtggcctttttctttttttgctttctgttacgttagtttttctttttgccatcttctttttttattattatatattttttctctcttttttatcatcattttttatttacccagacaaaattagggtatgacaacttttattcaaaaaagaaaaataaaactctcgattgtagttattgttaaactgccttgaaaacgggagtgaggaaaatgagaagagacaaaattgctcttgttattcttgttataagattgaatattgatagctatcagattgaacgtcaaagctattagactgaacaacaaagcaaaagaatgatgcagaaatgttgtaagaagaaactagcaagcacacatatacacagaagaaaaaagcaaaaaatggtgatgtatctattacaccaagtgcttaaatacagaagctatataagcctctacctaggcagagtaaaatttaagtatgacaaagctaaaaagtaacataagtctacaactaggcttttgtcatcataatgtttgcaatctgattttctgaattgcaatgctccaagctcatttgcttttacttcttagcttttctaagtacatgatacttcactttgatgcgcttagtccttccatggtgaataagattcttttgttatagcaaatgattgatttattagccacccaaatgacagtcattgcaccttgaatttgcctaacatttgatatcatttttcttagccaaatgacttgatttgttgttactgcagctgagatatactcagcttcaatttgagattccataagtttgaatctgacattttcattgcattaaactttcttctcaagttcacaacctgcattctttgtgttttttcctctgttggacttcctccttcaacttatcccaaacttcttttgccgtcttaagattcaagatcttgataaatacagcattgtgtaatgcttcatgtataatggcaagtgatctaccttcctttgccactttatcattatgattccttatctgagctacatttcggttgtttggtaaaggaggtggattacttccatttcccaccacatcccataaatcaatgaagctaaggaatgacgcaaaaatgttgttggaagaaactagcaaccacacacatacgaagaagaaaggaggaaaaagtgatatcatgtatattcaatttttttccctaattgagcagaggaaaagataatcatgactaagctacaaaataaacatcattagcctacaactagcttttccttaagtacaaataaccttcaccgaattttccaagtaatgaaaagttgtagacacataagacattttaatatgataactggaaaaataatctaaatttctaacaattctacaatgccgggacactcactaatgcctgctactcttacttttatttgttgtcttaatattctatcatggatccctgataaattcattatatttataggggactgttgtgttaatcttctgtcacttactctggtcgcacaactcttgcaactttgccttgtacattttcacattcacacccacatgaaaagtatttaactctaccctgcccattataaaacagttaattaaaattaattgtacagatttaaaatatataaaatattgtaattgtccattataaatcgttcacaaacttaataatgaacccaaatttcttctttgttgtgcctgcttattaacatatatgattttttaatgaatttttaaatatgagagaatctatgtgcaggttatgcttctaagctggtgaaagtattaaatatattttattttatttttcactttctctgtcactgccagtctgtgatttttttttttctaattggtttctgctgacctttgataattttttttaatttattttgtcaattattattaattatgcttaatttaaattatcatgtggtagctccagcggatctgaaagtggcacgagcattatatagcttcgactaatatcacataagtaagttggttctctattaaagtattcttctcatcactaacataattatctggcctcaaatgatacaagaaattggtacttccttcttattgtcctcatggaactaaagtttataagaacagagctcatagccttttgtgaaagtaagttttcaataataactacaaaagaaaaaaaaattataggaatattgataaactgactttactaatttaactatttatttattaattgtttgactattttatctgaaattttaagatttagatcaacatatgatttattactagtgggaataaccatgcaactatggttttaaatatctgaattcttagttgttgttgttctgtcattaccaatttaccacatttgaactatgggaaatatataacagcaacaggtatgtattacttagcttataattccataacagtagactggaaagtagttctgccttctgagattcataaaaaatagtgcatatctatttagattttatggactcattttggtttgacataaaatttagatacaaattagaaaaccataaaatttacataaactttatctttttattatgtttacattttacattgaatcaaggtcatttcgaaacatgaatcctctcttgtgatttaataaatatatagttgtgttatgtgatgtgatttttaaaatttccagaaccagctaaatacactaattactactacattctttcttcgctacgatgcagctctagcattgtttggattgcttttaatttccagtgataatttttatcactgttagtagtgcatgatttgtatggtagaattctgtaattattatcattgtttggagtctggctttttattggtttccttggtcatttaaccggctttgctcctagaaataaggtatctcaatttaacacatccccatccctttgtttgtctattacacacctcactttatcctaggcatatatgatagcctaatatccttgttctattgtatacaatgcatatgaccataaaagcaatattttggaagcttattacattgggcaatcagttcgcaacaacatatccaatgtttgtatatttcaggctgtataaaatttttttgaaagcttagtgttggctaaaacagtgtaatactaatactctttcttttttattaaaaaaacttcaagttagtagtgaaacctaagagagtgaaagtatggtctgttcttgtttaagctagtctttgtttatcaaatattataaaagagggtttctatcttaaaaaaaaggagagtttttaattacgggagtagcagcaccattataattaggggaggagaaacgacgctaggacctgggagaatttttataaatattaaattactaattagtaattagtaccagccaatatttactttacattttaattgcggcaccaataaaaaagggcacggcacgagtgcagtagtgcacgttgcttttgtttgaccattacgagcttgaccaatagaggaacgacaccttagcagcgacctcgatttcgcttcgtcttcttcctccatgggtcattcggtttcgtcttcttcctttatgggtcattcggtttcgtcttcttcctccatgggtcgttccgtttcgtcttccttagcttcctcaacacaccgctccgtgaccgctttttccgccacacccacccacgacagcggctgctactgccgctttctcattttccctgttgcggtgcggtctgttgcggtcagccgccgcaccgcaccgctattccactatttggtgcaatagcgccgctattgataacatagatgtaaacccttcaatactgtgtaaagatagctgatgcacctcctctttttcctcatctttaccttcttctggaccccaccattcctcttcctcctccataatcatcaatctcagttgtttgtttttacaaacatgatttgggagatacttttcattacaagtaaagcattcacccttcttcatcttctcatttacctttataggagataatctatggaaatttttctttttattcagttgttctcctcttgtttttactcccccaacagcctccagcaacttaccactcccctgctgcccttctttcacacctcttggtcctgaaaaattagttctttggacattaggtatccattttccaattcagggtagattccccagaactctattcttttcttcaacctgcctggctttcatcatagtttccagcagggacttaggctcatgtagcctcacttctgtcccaatttcttcatttagacccttcacaaacacctccatcagaaaaacttctcccaatccctttttagaccccacatgctttcgaaaagcccaatataactctgcacacaatcttcttgcctcaaagaaagcaaagcttgaaatggattacctagattggaactctgaaacctctgcaccactgcattcttgaattcgtcccaagattgattcaagcaccttgattcccaccattggaactaagccaaagcttccccatccatggccaccagaatagcttccattttctcctcctcccttactgcctgaagtcggaaaaacctatctactctcgaaatccagctcacggggtcctatcccgtgaaaatcggcatctctatttgtctccactgccgcacccccaagtcttctacttccttgctcctgggtcgcaccctcttcgccgctcttttcgaccccgaccccgaccattcaaaattagagtttcttttccctgtgttgcagcaagatcgttggaattgtcggggtcggggtcgaaaaaagcagcgaagggggtgcgacccaggagcaaggaaggagaagacttgggggtgcggcagtggagacaaatagagatgccgacgattcaaaattacagtttcttctccttccttgcctgaagtcttctccttccttgctgcaacacctgctcgatcgtgcccaatccggtctccatcatgacccgattggcttccaaagcttcgcgatcctgttctctggcctcacgcgtctcttccaagaccctctccagtgcctcaactcacgcctccattttactcgtgttcttcgctgccatcaatgacccacagccccagaatggagctctgataccagtgataggcactggatcagcagaaatgaaagaaagagagcagaaatggaaagaaagattattattgaacgtatggagaagaatctccagcttctacactttgtgattcgaggtcacaatcctccaaattcttaaccaaacctttacaattattcccctatgtatttaaagcttttttccctcctaatacggttctaactaactcctaactgtcactttttctcattacaccttctgctatatatttttccccacctgttggacctatcagcgtccaatcccgtttaacatggtttgggaacacagttccaaacaagctataagtggattatgttgatattggtgactgatgtgaagaaagataaagcctcagcattgacagcaagcttgcattagttgaggctcaggttctttttgctccatgggtacgctgcctttcaactttcagtttagtatgttatactttgtattttgctttgctgcattatgtgtgtgtggttcaagcgtggataggggtataggaaaagagaatttgtatgacagagagatatgaacagagaaaagagtatgagataaccttttttttggtacaagacacacacacacgcacactcactccatgggaaataattctgggtgagtcagataggaccacttaaaatactaataattctgggtgagttgtataattagagaactaaaaaaggttatttgtcaccccaataatgttggttttgtctctacaacttaaattctattaaatgggtgttaaatttctccaagatctctctagtatgttttctaattctgcaaggctcagagataggttgatccttttgttcattcaagcatgaaacatgtttttggaaattcgaaaggagtgtttcctcctcagtcccttcaaatgattgagaaggaacttggctttccaagctgcaaggtaaaaatgcaaactcatgttcagaaaatggttgttatcaaagtcagaagtatggtagtttggtagagaattctttgttaaatatggaaacacttcacacttaaccaagaggggggggtgaattggttggccttggtaacttaaaactttttgggtaattaaaattagagtttcaaaatcagagcttcttttccctttggatctttatcacaaatacaatcaagattctttatccaagatcaatccaatacttgtaatgcttcaagaaacaagatgtaaaacagaattcacaaagaaactaatcaaacatacagaatatcaatgaacacaagatttatactggttcacctcaaacactatgaggctacatccagttttcttctactcaacactagagtagagttccactattgtaaataatattcttacaagcaattacaagcttctccttatcaaccctagataaggttcagagatctaaaaccctattagacccttagaagccacacccacactgagcacactactcagctgtccttggagaaacactatctccacccttacaagaaaaaccctcttacaatagaacaacataacaaagattcaacagaaaactttacacccacaaagagtaaggaaagaattcacctgatgatccaagaatgagatgcataggaatggaaataccaggctgaatgcaaaaacaattatgcagaacagcttttccttaacctttgtgaaagattgtcttgcttcactaaaaccttaatgactcatatatttatcaatggaagcaagagcctaagaacctagaagaatgcctttgtgaatgcttagaatgcttttggaacgctcagtaatcgaaacctcaaatcacacaaatcaaaaaggcatgggttctatttatactaatttttgtaacaaaaataatcgattaaaaacgcttctgtaatcgattgtttagcatttgtaatcgattacatacgctcccgtaatcaattaaaccgttcatagtaagttttgggttcatgcaacggctcatataatcgattaatccgacgcgtaatcgattactccagaggtcctctacaatcaatttgtattgagtaatcgattacaatagttggtaatcgattaagccagactaaacaaaaatcatgtttaagtaatataatcgattacaaccaatcgtaatcgattaatgcagagtgagtgcaaaatatgtaatgagctaaataatcgattacaatgagtggcaatttattaagatagagtgaccactttttcctaacaaacatgtaatcgattacaattcaatggtaatcgattaaaccagacacttagccaaatcatatgtatactgagtttgaaataatcgattaatccgatgatgtaatcgattaaattgttcttaataatttttcagaaagcttgaagaacaatataatcgattctctaagtgtattaatcgattaaaccagcttcatgctatttttccaaaatacttagcttctttttaagtttcaaatcaaatacttaaagcctttatgatgtaatgcttaaaatgagtatgaatgatatgcatgtaaaggcttggatcatcaaaatgctttcattccttttacatttaatcacaaacttcatcttcaagccttcaaacatgttgaaagccaaaactacttccaagtcttcacattgcttcattctttaagtaatcttcaagtagctccccctcaaatcaacattcttttctgtgattttaaggggttgcttagcttgcataatgctttattcggttaggtgggaaaagtaaagtgccattaggaagagggatattttggttaaaaagcaaccaaagtcaaagttcttgtaagctataattgaagccatgccatgtgaaacaaataatgtgcaacaaatgattgattaaggttaacttaaatagttgttcggttgttccacttccatccctttattcagttttacaaaagcagatgcatgttactggaatcttggctaactaaattaaagattattcacatttgattttttaagtgactgcagagagagtaatattgaatgaacataaaacttgtccttcatagttttttggtgcatcacacatgcatgtctacatcataggcataactaaaataatttttatatattctggttggatttcaatcagcctaaatttatcgtcacatagctatagtactggtttaggtaagttaataatgcagaagcctcttaggttgcttattagtaaatgtttatcttttagtgaataattaattaggagatagctaatatgtggtcctgctttgaattgaataatcttttttctctctttataatctacaggatgttctacttctttaaatctcgaagcagtaagaatgatcctgttgtcatatggccgagtggaggaccatgatgcagcagtgaactagctttgttttacgaaaatggtccttttcagcttaccaagaacttgtctcttctgtggaatgactatggctgggacaaggtacgtagctattaatttcccgttgtccttttctcactttacttctcagtcacttagtcacatataacaatcgtgacaaatcctatcaaattttgtgtgctttgctatgctcattccatgcagagtgtctaccaagaaaaaactaacaaacaaactgatattatgcatattcctgtctactcttatactatagactttaactagctcaaagaataaagttgatacaccacttgtttccttgttggcatcaatacggtgttttctcattttgtaggcatcaaatattatatttgtagaccaacccactgcgacggggttcagctatacttttgatgagagtgacattcgccatgatcaaaagggtgttagcaatgatttgtatgacttcttgcaggtaattctatttgataactgataaaataaaattatttcataataaaatcaaactcattcatttatgtatgttatataattactcatattgagtggttaaacatgattcacctttggttagttatacattaattaaaaatacaggatggtgtacataccatctaaatttcaagttatatgctagactccgccgttgtgcatcataggatccattcaattttacaataatgacaggcatttttcaagtagcaccctcagttcactaagaatgacttttatattactggagagtcatatgctggacactgcattccagctcttgcatccagggttcaccaaggaaacaaagcaaaagaaggaattcatataaaactaaaggtctttactatctcataatttatagtataactatgaaaggttaattaattgctttttttcttcattgtattgattcctttgatcccatataataaacagggttttgctattggcaatgggttaaccaatcctgaaattcagtaccaggcatatacagactacacattagacaggggactgattaaaaaggccgattatgacagcatcaacaagttaatcccaccatgcaagcaggccatagaagcttgcggtataaataacttcctcaattcttttcccttttcaccaggacaaaaacacaaatttattgcgctagtcagatattacttgtgttcattgacactcttaatttacattccatttgtcaggcactgaaggtggagaaacatgtgtatcttcattatatgtttgcaataagatattcaattggatcatgaccatcgctcacgatgtaaatgtaagatatagaaaaacattagtatgactgagatgaatgaaaataatgcagtttgagtttaccatgtttttcttccaaattgatattttctctatcaagttttctagaagaaatttacaatctcatacacatgtgttatgcttaatgttgatgtcgcaattgttggatatagggggagcatcatgaagattaaaaaggatttaattcaagattggttttgagctttcaatatgcttggatgccttgaagttttgtaattaattcaagtgtaagagaaaggctaatctgatgatccatgcattgcattcactcattcattcataaacttaaatggttttcataaaaaataacaaagcttttataatttggttaaggttttaatctgattgaaaggtttttggaaaaatgctattttcactggtttaatcgattaccttactgatataatcaattattttgttctttgttcaatatgaaaaatcttttatgaacattgtaatcgattacccatcggaataatcgattatttggtctttgtttacaacaaaactgctttgttaatgattttaatcaattacttaagtgttgtaatcgattacatagttaaaagattattttaagtcttgttgtgataatcgattaccattatccgtaataaattacataggctatttgagaaaagtcacttcccttcttaatcgattactacagcttgtaatcgattaaacaatttatgttgaaaatataaatattctactttaatcgattaccaaatgatgtaattgattacatagtgcattttgttatcctgagacttctgttttaatcgattatagctcgggataatcgattattttgctcgttgctgaaacccagaaacattcttgaacaatctaattacatggttattttaatcgattatataagcattttaattgattattaggtgcgtttaatcgattacaattagttataaattctgttataaataggattgaaggcttgacttgttttacaacttgaccattcgtatttctaagctcacacaagtcttctaagctttcctaaagtgattttctcagtgttttaacttattgctttattcaaaacatcaatggatctttgaatgattattgagcaagattcttttcaagattaaggaaaaacatgttctgaattagtttgctactcaacctgatttggtaatttatgtgcataacattcattggatcatcatgttgtctctctccttaatctttgtgtgtaaatttggttctgaatttctgtttaagtttgctattgtaaagtgggttcttgcttgtatctagagaaaggttctctagtgtgaagaacagagtagtgttctctggttctttgtctcttagaatctaatagggttttagatttctattctttatctagggttgataaagggagatgttgtaattgcatgtaagaacataattttataatagtggaactctaatctagtgttgattagaagaaactggatgtagcttcagttgtgaagtgaaccagtataaattgtttgtctttgattctatttctctatctctcatattcattggtcattgattctttgattcatattcattgtttaacaagttctgtttttatctatttatttcttgggttgagacatttgattgagtaaaaagatttcttggttttgaaagtgataaagatcctgaactttgatttgtataagattttaaaataccaaagttttaaccaattcacccccctcttggttattgtgagtattcctattattttcagcaataaataacacaaatgatcaataccaggtcaacttttaattttatctgtaaatgatttatttaattaaaccactttagttcaagactagctaatatatggataggttgtcattaaccttattccctcactttataatgtttcaggaacaagtacttgtggaacaacttaggaagtccaggatataagtaggtacgtacatgggtctagttgcaattttcagcttgcaataaatataaaatttaattgaaaataatacatagttagtaagatgatgcttggtgtgtctgttttggtctaatgtttggttttctttgatctatcatatgagcatcattatcacgtactactacataccttgatgtcattgtgggatgctaaatgtcagcttcggagaaattgaaggaaagggtccacagttgctgatgccactcaagcagataagcatgcatacatgttactcactcacaaactttattttttacatcacccttgaccttttttttatatacttatcttatgtatatatttatttattttatcacatcagtcatcattgattacatcatccttggggattttatttaactcaatcatttctttttttactgtctagagttactagtaggcatcgcagctgcttctcttacaaaaagcagtgaaactggttcttcatagttgtaagtgaataatttaattagaattttttacttaattatttattttacagtaagagaacaaactttttttaaaacatggtattagtatatgagcttatctatttgcactattggatgaacagatcttttggttttcttgccaagtaccgagtaaaagattctattagtgtgtttggctacacattttgaatgtgattttaagaaactaatagttatagcttcttcgttccaaacatgattccatacttaattggttttccaaacatggtattggtatataaatggacattgcgagaagcattgaccctggtttaagaatactttcaagcttacaaaattgcatggtttttcaccaataacatttcacaaaagctacataaaagtcaccagccttgctgcattgaataaggtctaacaagttgaatgtaggtctcctaaaaaagatgggtgtaaaataaaatagaaacattaaagtgtatttgttgggtggctttgttactttgttttgtgaaacctggtgttgaacttcatttatgcaaaattgtatataacctgctaaataaagggtcaagaataaaacatacattgtctattcaatatatcagcctattacttgcctaaaggtcaatgtgttcacgaaatttaaattgtctttatgctattctgaaatttattttattaccacctaatatgcacctgtttactctttctatcctattcattcatttattaattaggaaaatttcaacactgcaaaaagccattatgttgtaaataggctcaatgcatttgaattagttgtttactatttgggtcactatatattgatgcatttttaaatattaaagtttctgattgttaaattccttacatatatattatttaatattataattatataaagttgcaatatgaatcgttaatttttttatatttagaaaatcttttctaagacggttcttaggaaaaccgtcttagaatgtcacattcaaggacgattataggctaagaaccgtctttgaatcgtccttgaatgccccattctaagacgattatgagggaaaatcgtctttgaatgtgacattctaagatggttttcctaagttgtcttagaaagaatttttttcaattttttttattttaaaagaagcctttctaagacggttctaagaccatattctaagacgattttactaagaaccgtcttagcaagtgaggctacaaagacgattttataatcgtctttgaaagtgattactttcaacgacgttcgatgcaaagacggttgtacaaccatgctttgcattttgggttgatcaatatatataactcttttaacttttaacttgatcaattatcaagttatattggtagagtaacactattcatgtttctcatgatgataaggtataaaaaatctttcacacttttaacttttaatttgtttttatttaaatattgggggttcttagttagatttgaactatgaaataatgactatgataattttttattataaaaaaaacctttaactaagacggttctaaggaaaaccatcttagaatgttcacattctaagacaattagtttaaatttatttaattttttcaaaaaaaaaaacttatgtctaagatgattcttttgaaaatcgtcttaaaatgttgatattcgaagacggttattatgaaaaccgttttagaatattgacattttaagacgattctcctaagacatttctcctaagaattttgtcttagaaaaaagtttttacaattgtttttttttttaaaactcctttctaagacaattttatgaaaaaccgtcttagaaatacatgtattttttttacaagaaaaatcatcttctaaaacggtttccttgaggaaccgtcttagaaagtaaggactacaaagatggttttataaccgttgtcgaaagtgataactttcaacgacgttcgatacaaagacagttatacaaccgtcttagaaagggataaagaactgatgtagaaaacaacttttctagtagtgaatttgaagcacttctccacggtggatatagtttatttagagagataaaactcactttaatcatctttatgtttctaagcattttgtctccttttgtggacaaggagatattattgatgtatgtataaagtaaacactagtaattaaatattaaaaaataatagaaaaaatttatttatgtattttactcatttatttttgggtgcttacaaaaatttcaaatcaaattatctcgtgctaagacattatttttaaacataacaccaccaaattactaccttttggcaattacttgatgcatcccattttttatattgtgcacctcatcggaaataataagcacccggatggactttttgaccctttattaatagtctaaggatgagtgctagggttactgtggaagatgggagtgtcacctacattgttagtagagaaccaccatacatctccacaacctccccaggtgaaaccaccatgataagtggttgtttggttagctcacaacctttgtcgtttatgatgttagagattgaccaatcagtaactatatcacaaaggtgattggacgaagtcgtgcatggatatagtgtgtagaggccttgtatgcaaaatagaggaaggtcgtgtggaggttattgtggcgcataattgttgctgccgtggttaggtggtgcatgcagatttggtggaaggaggtgacgacgcgacaaggagggaagaaggggtgagtggtggtggtcgcacatagcgaaggtttagggataaggttgtgggagagacgaagctaggcttttgcttggaagaagaagagtgaaaagtgaatattagaattttttggtgcaccatacaaaaaaatgggcatgttaagtaattttcctaccttcgacattgtcaggcccaaataacaattcaacaaagcctctttgggtatgtttgaatttgcagtgaaaaagtcaaaagtctacttaagagtaaaatcaatttggaattatgtttgattatcgaatctgtctaaggagtgaaacttgagaatttctcctaccttggaaatattttaacaatcgttaggtttcattaattttaaatcaatggttgtgatttttcttttatccttttcttatccacttccctgatttgcccttggacatggaattgtcttttgcgaacaacaaccacttgccaccacctctcctcgatcacccttacaaatgtccttcactacccgtcttgctcttgctcttctcctagtccatcactttgacaagtttgtcatggccatcctttgaatcaccagtccaccaccaacatcttcgatctcgtgaaccttaaattcaatgttgtcttgatctgcaccatgcaccctattttctttcaatccactgaaaacccatggcctctggcttatacttcgacctcatgttcccatgaatgccaccattatcttcgttgcttacaacctaggccattgcaacatccccaaaccaaatgaccacaactaaacttgcaaaacgaataatgcaaatagacattttttttattataacaaaacacaagtaacataatggagaccctacaaaagcttgatggaggtgatttcttgagaaaagcatcgttgatgaagattagagaaggaataaggcttagaaaggacaatggttgcggggggagagtttgccgtcaaatttggtgtcaccatcatgcattgtttagatgtgaaagagaaagggaaccaaaggttaaggaaaggtggagaaaaaagattaaaaaaaggaaaaaaagagaaaaaaaaaaaactcaagtcttgatatccttgctaaaccccaatcaattattaattctcttagtttatctacaatttgtaatttgtcatctagaattttgttgatatcctgaaataattaagaacactactacataaaaggactttaacattggttatggaggagttcaaaattggtttagaattgatgttgaaactaccgtcgttgaaagtagacatttttcaacattgattttaaaattgattttgaaaatccttatctacattggttctggctgtaaccgatgtagaaatgtgaccaaaattgtgtattctcaagccctttctacatcggttttgtaaaaattaatgttgaaagttgtatacaacatcgatttttggcaaaactgatgttgaatgtgttataccacatcgatttttgtcaaaaccgatgttgaatgtgcctttatagcatcggttttggccaaaactgatgtggtataccacattcaacatcggttttagacttacctatgttgttttttgaaatttcttaaatattttatctgttttcacaatgaaccaaccagaactaatttataaaaaatatattaattttaaattaaaatatttaaaaaatatttttttcattaaatatcacattacatacaatgtcataatattaatgatttcatggttagcattagaaaaatatattctggaaaaatataaacacaaacaattacttttgtatttaatcaacatggcaactttcatctagctaagatgcaaaacattctattatggagaaagttattaaaaagataaacaaaaagctttcaaggcagattttaaatgattccatggttagcatcagatatataaggccataacaaaatatgaagatgaaaaataaaatagtttgtacaaaatttgatgttaactaggctagactattaagagaacaagtttcatctcaaccaaaatttcatagaattctagttgaagtggcattaaaagcatcatttatatttttcattccaaggccagcaccttctggtgacttacactaagatatcatatcctctcagcccctataaatatttaaaagaaaagaaaagatactcaccaaagcatttgcaataggcccttttctccaccaagaacatgcttcagaacctttgcattgtaaggcctccgagatagtaggaatagacccgaagttttgctgccacaggttgtccatgtattcggggtcgaagcctgtacaacagaagaaacagaagttaggaccagaacagactcaggcgttgcacacacacattgacgagctgctacatgccggttttatacgagagatacagtatactacctagctttcgaatgtggtaatggtccgaaaatcgaatggaaagtggcgagtatgcaccgactacacagatttgaataagacgtgtccaaaggatgcataccccatgccaaatattgatcaattggtggataattcgtcggggctcagaatgttatcgttcatggatgcattctccagatacaatcagataccgatgcacccagacgatcaggagaagacggcattcattggcgacaaggcaaattactgctacaatgtaatgcctttcggattgaagaatgctggggccacttatcaaaggatgatgaacaaggtttttgaaccacagctcggtcggaacatcgaggtttacattgacgacatgatcattaaaatagatgaggtcgatcaccatgtggcagatctggaggaaacatttaaccggttgagagaatacaacattcgcttaaaccctttaaaatgtactttctgtgtgtcggccgggaaatttttgggtttcatgttgacacatagagggatagaggcgaacccagataaatgtcgagtcgtgttagacatgcagtttccgatgaataagaaggagatacaacagttgacagggtgaatagccgcattgactagatttatgccaaagtcggcagagaaagctctccctttctttaagctattgaataaacaagctgtaatacagtggaacccagaatgtgaggtagctttcaccgagatgaaaaaggctctagcttctcctccagtattgtcgaagccagaaccaggcgaggttttggtactatatttatcagtaggagatgaagcagtcaatgacgtgttggttagggaagttgatacaactcagaagccgatttattttgtaagtcgggcgctgcgtaactccgagttacgatatcaaagacttgaaaaggtggcatttgccttgattacgactgctaagaaactccgaccatatttccaaagtcatactattgtgataaggactaatcagctaatccggcaagtacttcacaagccggatttagccggaaggatgatcagctgggcgatccaattgtcagaatttgacttgaagtatgaagctaggcacgccattaaatcccaagcattggcagattttataatggagttcaccccgcacattgttgggacaaaggattggtggaagttgtatgtggacggatcttccaacaagaaaggaagtggcactggaattataattgaaaatccagacggggtgtcgattgagtattctttgcagcttaactttccaacatctaataatctagtcgagtacgaagcactcattgccaggatgttgcaagcacaagagcaaaaggctaggaaaataaaagtgtttacggactcgcagctggtcacggcacagattgaaggactgatagagggtttttagttgaatatttttctatccttcttagcttatttgacctctctttgacccttattttcctattctaattcagtttttgggcctaggcaagtaagtgggcttaattactaattgttgcgtattttcggatttttgctcacttaacgtatctgacttgtgcaggacctatagggagctaacgatctccgaatggagcgttctaggagtccctggaaagataacgaaaagatctacaagtttgatacaaatatcctgaggccaattctgtcatttagagggtcatttttagctttgaagttaacgcctctgcacttgtaattttgggctgcgaatttgactttcatggttgtaattagcaaataattagattgttgggcttgtttgtggcccatttcgttttcagaactcagtcactacatattagtgactttagtgagacttggacacactttttacaatttcaataaacaagttttattttcctttcctttagttttttagatcaaaacccttgctctcattttctctctactgttcttccttattcttcattgttcttcattttcgtttttctgttcttccattttcgtgcactcaatctgtggggctttcattgatgatgatcatggaaggctaaatcaccaatcaatctaaggaaccaaccaaggcacaaggagaatcggagttctggtttagtatttcgaattctatttgaatgttcatcttcttcttcaattgctattatgttttccatgattatgaatgcgtttaggattgaaagcggattaggttatggattcatgcctaatttcgaatattaatcacagaattaattggatgatatttcaattagggttgtggtttcaattaaattaggggttaattcgattgaacaacttctaatgagattgaatggatgttcatgataggataaaattctgagaatgatgatgattcgaattgcttggtttggtgaattggattaatgcttctctaatctgttttactcacttgttgataatcttgctaatttatgtgttgctctttaattttagtttacgtttttgcaagtttacttacgcatacaaactgtttgttaaaattccccccttactgttaccattaaattgaagctagaaccatattgatcgtgtctctgagtcgacctaggttagctctgtgctacagaattagcttagtaaaattgttttggtgcgtgtcgacaacatgtttatcaaaactggcgccgttgccggggacacggtttactgtgtgctagctttaatttgctgtaaatagttcatagtagtagttatatatataaaaaaaaaaatcatttgcatacattcactgcatattgatattctgttgcataattgcactttgtcacatatttgcattgttgttgctgtgcattatgaagtagagttgatgtagttgatgtgtgctgccaaaaaaaaaaaaacagaaaaacagggggattgggtgtgggttcaaattggcaaattcgaactctaagtaggagttttggaccagtttttacaattggcgcaggggcattctggtaatttcacagcaaactatctcggaatgggctgaaattttaccagaaggtgcggaaattttctaatttcatcatttttaattccacattcaccaggggtccaaatcgccaaattccatcgtttagaccactttttaggtaattttctaatttcatcatttttaaaaatcaccaaaaaaatcacaaaaatcaatcatgatttttaggcattcaacgttatttttctagattttttcaaaaatttttagggcatttttctaatttctatttcatttcagcatatatagttggtagtatcctggtagcttagctgtttgatgtttctgtgctgtctgtgtttattgttccttatgatctgaactgtgtatgactaggtccacatcaagtgaattacattcatttgatcctgagatagagaggacatttcacagattaaacagacataaccctaggttagatgacttagatgactttgatagtgtagttttagatagtagtgtagtatcttctgactttcattctgaatctgtttctactccttctacttctacacatcttgatatcatggctgaaaacaacctaactcttaaggagttagctacacctgatgttgtttaccaaccctggtgtattcaataccctgagactgaggtcagttatgaactgaaatctggcctaatccatttgcttcctaaattccatggacttgctggtgaggatccacataaacaccttaaggagtttcatgtggtgtgttccaccatgcaacctcatgatgttcatgaggattatgtcaagatgaaggcattccctttctctctggatggtgttgctaaggattggttgtaccttcaaccagatcctatcactacttggactgacatgaagagaagattcttggagaaattcttccctgcctccagaacagcatccatccggaaggaaatttgtggcataaggcaattccctggagagtctttatatgagtattgggagagattcaacaagctgtgtgctacatgtcctcaccatcaaattagtgagcaattattgattcaatatttttatgaaggcttgatgttgatggataggagtatgatagatgcagctagtggaggagctctgatggataagacccctcttgctgcaaggcagttgatttctaacatggcagccaactatcagcaatttggtgctagagttacaacaactaaggtgatggctgcaaatgaagcttctgtctctatggttgctgataaccagagattggagaacaaattgactgagttgacatctcttgtgaggcagcttgctattgggcaacaacagactgtgatggcagccaatcaatcaaggctttgtggtatctgttgtgcccctgatcatcccacagatgcatgccccactctccaagagatagagcagcctgctgaagtttctgccatgcaacttggccagtcatttagacctcaacagcagtataatccttactccaacacttataatcctggttagagagatcatccaaatttgaggtatggtcctggcccacaagaacctcctccttttagacctccacaacaacccttccagcctgccaccactaaataccaacctcctccttttagacaacaaccacagttccagcaacctgcacatgcacatgcacctgcacctacaccgtcacaacctgtgcaggctagttctggaccttctttggaggatttaatgaagcaaatggctaccagcaaccttcagtttcagcaaaatgtcagtgccaccatccaggacctacagactcagattggacagttagctacaactgtcaatcagatgcaacaacaaggttctggtaatcttccagcacaaccagttgttaatccaaagaatgtaagtgctattaccttgaggagtggcacggaacttccaaatgctggtgctaaaattgatgctggtgctagtaaaaaagctgataatggtgccaaaacagattctgcaccaaaacagattcccttaccttttccttctagagccattcctgcaaagaaagtagtggaccttgattctgatatgcttgagactttcaggagggtggaagttaacattcctctcctggatgccatcaaacagatcccaaaatatgcaaagctcttgaaggatttgtgcacccataagagaaaacttaagggaaatgagcaagtgaagatgggcagaaatgtttccacagaaatattagtaagagaaatcaacaaaacgcaatcgctggtgtattttgtaagccgagtgtaaggacttttaatttcggcgcttaaccccgcgcgatagcgcggggattcaggtcagaaaaccctgctaagggtgcggcaccgggggcaccaggattggcgttgatggcgccaaaggttatagctttagaatccttggaaaggtgtttaaaatgtaaattttaaggtggctctggcatatggcgcgacccacttgaagtgtggcgcgacacgcgccatatgtgttttacagggcagatggctctgccatgtcacgcgagtcacttgaagatccacgcgagtcgcgtggcaagtgacccagaaagcatgattttgcactggaactccacgcgagtcacttgggatccacgcgtgtcgcgtggaaggccagaaagtttggcgcgagtcgcgtgatgaagcgacgcgagtcgcgtgggaagtggctcagaaatggtatttctgtctgccatctcaagtgaaacgcgtgggaggtcaagtgagtcgcgtgggaatgtcggcagaccagttttaaaggccaaaaacgtgagaaatgggaggaattaccatttcttcttcctccactcagcccaacctccattgatgattccccaagcttcctaggaccttgttttgagccctaaacacttccctgaaccttagaatagtgattgaaccgattagaaagcttgaatccttcatcaatttccttgaaaaccccagattgagtgagaagaggaacctcagagggaagagctcagagagcttgagcttggctcagaaccacagcataattggaacgtagaagctagaggaagctgttctgaggctgttgggttcgccactgaggtgagaaacacaagtttcaccgtttaattttgattctgggggtctctgtgaatagtgacccatatgagctaggactagaattagcccagggtccagttgagtaagttgttcagggcttagaatagatgaaggattagctttcagtttttgattatgatgactttggattttggctctgtggtttgtctgtgtggcctgtgtgttgtatctacattagtgtagaggccattccagagcctagactatgtctgttaagagcctgtgaggctagttgaatggcacctcgatggaggttaggccattcctgtggttttgagtttgtgaaggctgatgaaataaggccatgtctgttgatgttttgtgatgagtttagcttgactcagcagcttggcctctagtctgaaagaccttgtgaaggtctctgagtagtcccaagtggactgagcttgataataccctaggataggagatttatattgtgatatgttctgtgattgtaagcctgtgggctggtttgatctgagatttcatgtgccttggttaggccgtgagcttgagactattggtggccagagccacagacctgggaaggagattcagtcagagaccttaccaggtaagttcagtgttctccgggaatgaattcccgttttggttgcacaccacactcctggggagtggtggtcatgattcatactgcatgcattggctatgacattgtgtatgttgatggatatctatctgcatttgatatatgcatgctgtggttgaaataactgttggccaatagaagaataccagcattgaggagctctgctgtgtattctgggcgttgaggagctccgccctgtggcattgaggagctctgccacaccatgaccggtctgacgttgaggagctccgtcagtggcgttgaggagctccgccaggcattgaggagctctgccatctatcatgtgatgatattatgttttgatttgatatgatgaggccagagggccaggccagtgggccatatctgatatgtttgactgatatgtgtgtgtggtgaatctgtgagccagggtgggaatgagttcccggggacccttagcttactgagatatattatctcaccccatgtggggcttgcatgatttcaggtgacacgtctggtcgagaagatctgtctcagggcaggaggcccaattgagactaggctgcttgagggagaagcggcgtgaagagcttgaaggctctgttttgatttattttggtgtatggttctgtataccctcagggagggctaatattcttttggtagcaccacgacatgtgtggtgtggactttgatgcatatgtttgtacagaacttgtatgatatgtatatataactttccctgagtataaatgatgtatttggttactctgcctataaaacctgttatctgtctgtattatgtttgatttgataaactggatcagcaggggcttgattttatggttctgttatgtgtttccatacataatgtatcaagaaaacgatcctatgtttccgctgaattgattaaattgatatttttatacgcttatctgatattattaatgataacacgtcggaggcctacggggtgttacacattatcttccttgccacagaagtgcaaggatcctggcactttctctgtcccatgcaccattggagatattaattttgcagatgccttgtgtgatcttggagcctccattaatgtcatgcccacatcagtttacagagcactacacctgggtgagatgaaacccactggtattgtcatccacttagccaacaggagtgctgcaattccacttggacttatagaagatgtgctggtgcgggtcaataatttgattttcccagcagatttttacattttggatatggagaatgagtctcccagccatggtcccacattgatcctagggagacctttcttgatgacagccaggaccaaaattgatgtgcatgcaggaactgtttctatggagtttggtgatgatattgttcagttcaacatctttgaggctatgagacatcctgcagaggagcattttgtttttctccttgatatcattgatgctgcagttgatagtgtagatatttctgatttgctctctgatctttcttctgacttttctgactttgatcttggctcttgtaattgtacctgtgatgattctgctgctgtgtgtagcatttgtgcggaaatttcctccgcacttcactctgattatgttccaggtacggatacaagttctgagcctactatcccactttcctcagcttctagtcttcccctaccttccactattcagcccccttccttggagctgaagtcactacctgagcacctcaagtatgcttatttagatgatgctcagaagctcccagtcatcatatctagtagtctgccaatggagcatgaagagaagttgatgcatgtcttaagaggccacaaaaaggccattggatggacacttgatgatcttcttggtattaatccttccatctgcatgcatcggatacttttagaggatgattctagaccagtgaggcaaccccagaggaggctgaatcccactattcttgatgtggtgaagaaggaagtgacgaagctactagctgcagggatcatctatcccatctctgatagcacttgggtttcacctgtccaagtggttcctaagaagtcgggactcacagctgtgaagaatcaagataatgagctgattctgactagagtggccaacagttggcgtgtttgcattgattacaggagactcaaccaggccactcgcaaggaccatttccctctccctttcattgatcaggttttagagaggttggcaggtaaatcccattactgctttcttgatggtttttctgggtacatgcaaatccacattgcaccagaggatcaacataagactacattcacctgtccatttggcacatttgcttacacccgaatgccttttggcctatgcaacgcacctggtaccttccaaaggtgcatggtaagcatcttttctgatttattagagagttgcatggaggtgtttattgatgatttcactgtgtatggttcctcttttgatgcatgtttggatagtctctctagagtgcttgaccgatgtattagtactaaccttgttcttaactttgagaaatgtcatttcatggtgcatgagggtatagtcctaggacatttggtctctagtagaggaattgaggttgataaggccaaaattgatgtgattacctctttgccttaccccgcttctgtgcgggaagtacgttccttccttggacatgcaggtttttataggcgattcattcaggattttagtaaaattgcattaccattgtccaagcttcttcaaaaggacgtagactttgcatttgaccagccttgcaaagaggcatttgagggattgaggaggaagctgactacctctcccatcatgcagccgccaaattgggagcttccctttgagctgatgtgtgatgcctctaattatgcacttggggctgtgttgtcccaaagagttggtaaactatcccatgtcattgcttatgcttcacgcactttggatgcagcccaagttaactacaccaccactgagaaggagcttttggctattgtttttgctttagataaatttagatcctacttgctttgctcccatatcactatctttactgaccatgcagctttgaaatatctgttgaagaaacctgatgctaaacccagattgatcaggtggatgcttcttcttcaggaatttgacattgagattaaggacagaagtggtgcagaaaacttggtggctgatcatttgagtaggattgagggacctcttgagtcctttcccattcgtgataattttcctgatgagcacttgatgcatttgcattcatcgcatgtcacaccttggtttgctgacattgttaatttccttgttgcatctgttgttccacctcatgcatctaggtcccaaatagctaaacttaagagtgatgctaaatattatgtttgggatgatccttacctgtggaggtttggtagtgaccaagtgatccgaaggtgtgtgcctgatcaagaaattcagtctattcttcagttttgtcatggcacacctaccggaggtcattttggtcctcagaggactgctaggagggtattagactgtggattcttttggcccaccttgtttagagatgctcatcactttaccaccacttgtgagcagtgtcagagagcaggaggcacaattacacatagacatgagatgcctcagcaacccattattttctgtgagatttttgatgtctggggtattgattttatgggtccatttcctgtttctcatggcttttcatatattttgcttgctgttgattatgtttccagatgggttgaggctaaggccaccagaactaatgattctaaagttgttgtggattttgtgagatccaacattttttgcaggtttggtgtgcctaaagccattatcagtgaccaggggagccacttctgtaaccggtcatttgcatccttgcttcagaagtatggggttgtgcatagagttgctaccgcttatcatccccaaactaatgggcaagcagaggtttttaacagagagatcacgcaagtgttacagaaagtggtgcaaccaaacagaaaggattggagcaagcttcttgaggatgctttatgggctcataggaccgcttaccgcacacctttggggatgtctccctatagggtggttttcggtaaggcatgccaccttccagtggagattgagcaccgtgcttattgggcggtgaagagttgtaacatggcatttgatgaagcgggtatgcaaagaaagcttcagttgcaagagcttgaagagattcgtttggaagcttatgagaactccaagctttacaaggagaaagtgaagaaatttcatgactctaggattcttagaaaggagttccatagtggccaaaaagttttattgtttaattctcgccttaagcttatttccggtaaacttcgatctagatgggatggaccttttgttattactaatgtttttccccatggtgcagttgagattaaaaatgaagctaccggcaaagtcttcaaggtcaatggtcaccaactcaaagcatttcatgagagccctcaagtggacgaagagcttgtggaggacatctctttggtcctacccattttgtgtgaagatgtgtcttgaatgacatttagggagtttcctttacccttcttttatttgttgtctctttgttgcatttctttgcatgcttacattgaggacaatgtgcatttcaagtggggggtgaagggtccttaaaattttttgtttagaaactggttattttctgttttctgttttcagtttatttgtctgtctgtctgtttgtcaatgtctgttattttctgttttctgttttctgtctgttttctgtttagttatctgtatatattctgtttgtctgttttagtttgagtctgtatatatttttgttgtctgtttctgctgtttctgtttgctgctgtttttaatgaatttaggcactttttcatgcttttcataggatttctaatttgcataaattgtgagaaatgttaaaaagttggttggattgagaggtttcatacttgatgtgaatcattgttgcaattgttgaagtgataagtaggcttgagaaatagaatttaagatgaaccatgtgtggtagaactatgccttgtgagtttttgagcctttgtgaatatgttctttcatgtgtgatttcacccttgtgctagattactctatgttttgccttgcctcttttgacattccttgttgcacatgctttgattgagatgatttaggccttccttcttttagccactagccaaataaacctatccttgtgctgatatccattgtcaccctctttgagcctttaaccttttctttcttgtttagctcattaaaaacaaaaaaaaaaatgatggaaaaccatgttaccctattaccctagctttagggagaaaaggggctttggaattgttttgggagtgggtttcaaacaagtgtagggtgtttgtcttttgttttgttttggaagaaaagaaaagaaaaagagaaaagaaagagttcaaatagtaaaaaaaaaaaaaacaaaaaaaacaaaaattcaaagaaaagaacaaaaagaacaaaaaaaaaataaaatatatttgtgtataagcaaagaaaaagaagttcaagcaaaaagaaaaatatatatatatatatatatatgcaataaaagttgttatagttcattttcatccttgtaaattctttcaaatttcaccttgcttctacccttcttttatcttgttggtttgctccccattgtccctcttttctcttaagctttagcctaaatatccttttcttatccacctttccctaagccattcattacaagctaataaagtccttttgatcttttgatgcatgtgtatttcaagttgaatgaatgagaggtttgtcaatgcttggatgtgctagttgcatgtggtgtttgagtgcaaatacaagccatacacatcatgtgaggttgagtgcttccctttgagagaattctatcaccttggtgcattcttgattctaagtttggctactttttcactttgcaccttgtgatcatgttttcatggattgtttgtcacctcaatattattcttccatctttccatctctcacttttgagcattgttgtgatccattgaaaaatatgtgtgccttattcataccctttctttaaatttttggtttactttagtttgaattttttctcttagtctttcttttagttttgcccaggagtgcaaaagtttaagtgtgggggattttgatagaggatttttagttgaatatttttctatccttcttagcttatttgacctctctttgacccttattttcctattctaattcagtttttgggcctaggcaagtaagtgggcttaattactaattgttgcgtattttcggatttttgctcacttaatgtatctgacttgtgcaggacctatagggagctaacgatctccgaatggagcgttctaggagtccctagaaagataacgaaaagatctacaagtttgatacaaatagcccgaggccaattctgtcatttagagggtcatttttagctttgaagttaacgcctctgcacttgtaattttggactgcgaatttgactttcatggttgtaattagcaaataattagattgttgggcttgtttgtggcccatttcgttttcagaactcagtcactacatattagtgactttagtgagacttggacacactttttacaatttcaataaacaagttttattttcctttcctttagttttttagatcaaaacccttgctctcattttctctctactgttcttccttgttcttccttgttcttcattttcgtttttctgttcttccattttcgtgcactcaatccgtggggctttcattgatgatgatcatggaaggctaaatcaccaatcaatccaaggaaccaaccaaggcacaaggagaatcggagttctggtttagtatttcgaattctatttgaatgttcatcttcttcttcaattgctattctgttttccatgattatgaatgcgtttaggattgaaagcggattaggttatggattcatgcctaatttcgaatattaatcacataattaattggatgatatttcaattagggttgtggtttcaattaaattaggggttaattcgattgaacagcttctaatgagattgaatggatgttcatgataggataaaattctgagaatgatgatgattcgaattgcttggtttggtgaattggattgatgcttctctaatctgttttactcacttgttgataatcttgctaatttctgtgttgctctttaattttagtttacgtttttgcaagtttacttacgcatacaaactgtttgttaaaattccccccttactgttaccattaaattgaagctagaaccatattgatcgtgtctctgagtcgacctaggttagctctgtgctacagaattagcttagtaaaattgttttggtgcgtgtcgacaacgtgtttatcaaggacgttatcaggtcaagggaccattgctgtcaaaatatttgtataaagtgaaggagctcatagccgagtttgatatggtagaagtcagccatacaagagcggacattctatctaaattggccagtaccaagagcccgggtaataatcggaccgtggtccaacaggagattgttcagccgaattgtgtaatgatgatctcggacgaagaagattggagacggatgataattgattatttggaaagggggatattgccagatgacgtgatagaatcaaagagattggtacgaacatcggctatgtacacaattttagacaacgagctgtatcgtaggggactccataccctgatgttggtgtgcctgaagccagaccgagttgagtatgtattatctgagatacatgaaggcataaatgggtaacacatggggcgagagcattagcaaggaaagcgttgcggaccgggtactactggccaacaatgggatccgatgctatagctcatgtcaggagatgtgagagctgtcaaaaacacgccacaagattattgtcaccttctgaagaattacaatccatctcggcaccatggccatttttcaaataggggatggacttgttgggaccatttaaagcagcagaagggcagttgaaatggttggtagttgcagttgactactttaccaaatggattgaggtcgagccaatagcctcaatcacgtcagctagggtgcagagattctttgagaggaatattgttgctagatttgggattcccggtgaggtcgttactgataatggaacccaattcacagataaacgtttccaggaattgatggtcgggttgcatatccagcatcatttcgcctccgtggaacaccctcaatctaatggataagctgaggctgcgaataaagtgattttagaagccctgagaaagaggatgtatgaagccggttcgagttgggtggaacagttatactttgtgctatgggaaatccggaccacgacccaaacatcaacaggcaaaacacctttctgaatgacttatggatgcgaggccatgatcccggaggaagtcggacaaccatcacggaggcatgcacaagtattacaaaaaggtgaagagcaaaataaagaggcattagcagtagaatcgagtctggtagaagaagtccgagttatggctcatgcttgtgacctcttagctaagcaacgcatggtaaaatcttacaataagaaggtgacaccacggcaattcgaacaggtcgaattggtcctacgaagagcagacttcgagaataagaatgctcgagacgagaaatttgcagctaattgggaaggatcgtatcgagtagcacagaaactcggccatagagcttacatgttagagaccttggatggcaaggcaaccaaaagaacatggaatgcggacaaactcaagaaatactacagttaattcaaaacaaaggggtttcatccttttctgtatctttgtgggtttctcttttattgagaatatgaactgggataatatcaatattcttaggtgcatatggttctcttttgtcgagagtatgaaccgggatagtatcaatattcctaggtacatacggttctctttcattgagatcagaaaggggtttcatccttttctatatctttgtgggtttctcttttattgagaatatgaaccgggataatatcaatattcttaggtgcatatggttctctttcattgagatcacaaaggggtttcgtctttttctgtatcttggtgggtttcttgtttattgagaatgaaccggggagacactatgaaggatcctcggtatacaaagttctctttaatcaagatcaccaatgcaaataatgtattacggttgtatgaatgttttgtctttgtttggatatgaactgagaatagttatctgctttggttcttgtaattctcatctgagatgatcataagtccattgtaatacaacagtattaagttgaataaaattctacattcagtattattatgtatgtttttcgtagagtatggatctcgacaggcagagaatcatatggttctcttaaaacttaaaataatactaggaaagttgggtgagtggatttcgtggcaatggttgatgcgctggtcagtcccgatcagattgacataaggaatgaatagttaatatattcctttcagcaagttagtcattgtagaaatctaatagcctaaaaaataaactcgtataaacaatacttggattttcgaaccaagacgatatttgttgcgtgcgcaaataatagaatggtaggatgatataattcgtctcacgatcaatgggaatacattacgaaaagtaatccaaatgcattaagaaattaaagtgcaaagattttcgggattgaatccgacatgttcaatacaaaaacatgttcaaggacataaaaacgtgttcaaagacataggggttacatagaaaatctgcatcccgacccttcaattctcggatggaggtggctggttgtcaggttggatggtggaagtcgcttcctctcccggagtcggatcttcgttaatcggaaccgtggagtcttcaggaagggaagaaggaactatctgaccatcctcaacataggacaggtagtgcatcctggcggtaacaagcttaacatccgggttcaagcatcgaacctgctccaaagtattattaaaagcctcctccacggctgaggctaagtatcccccatcgatgtaatttgtgcctcagcagcccggattttgtcttcggaggcaaccttcaagtcgttataagaagctgtcagctgagcttctcgttgctcagcagcctctaagctgcctttagctcatcctagatcgctcattagaaaggtgttggcaatctgggaagcacgcagctcctccttgagtttcctggtctcggcaagaaattcttcccgaagctttttattctcgacaacaagatcctccttaagctttttgctttcggcttgggccgaaaagagttcttcatggatcttcttgttttcttcccgggaagccgcaagttcctctaccaagattatatatttgtgctgtaaggtggagaatgtttggattaatgagtcacacttgaaggcattctcctcaatacgcccgagctcctcatagtcgtcatccccgaaacgatgagcttcaagaatatgagcgggaaccttggcgattttgaagagttcaccagtcacccccttttcccataagttcccagtggaagaatggggatcagttcagccggggtgggcgaaagaagaagtcggcacaggtgaagacacccttgtaacaacaacgtgttaaggagctgaatcagggataggagcactcatgaccttttgaggaaccaacgggggcaccgagactggttaagccaaaggtggcgctggggccactttggcctttttcagaccttccagggccgttcagtaggatggaggttgagtgcgtttgagagacttaactggcttggtagcaggtgcgccaggtggtgcagctcgagcgcgtgcagccttggaagcggtgccttgcctttgggtgcttcaacagaattgtgagcctgagaatttttttgcgccgagtcagtaatggcgttcggaacaattttggaagtagaagatggttgaggacccatgtcgtcagctgcaatgcaaaagaagcagttaaacacagtcattgtaaatacactagaataataacttaaagaaattcatattacaatctgtagacaatctggctcgaaggctgcggatataatttgccgcgttgggccgctcatggacatctaggtattcgaaaatttggaagatggaagaagcatcggaatcgggcaagtcctcttcagtaaaccggtaagatgacctacgttggccatgaggagcttttgaccagtataatggaaatgaccattccacatcagctgattcaggtccggataaaaagaaaggctgtttacccggctcagccacgactttgaaatatttgtccttgaaacccttgaaggactcggtataggggataaaaagtttacgtttggattacccccggagagaaacgcaccctttacggtttggaggttctttacccgaccttccagtatgggcactgtaataataaaagaataatggaactgtacagggaatcgccaagtcttcacagcataactcgaaggtcttgacgaatccccagctgttggggtaaagctgggaaggggctatatgaaggtgattcagaacctcgatgtcaaatgaagaaaatggaaaacagattcctaacttggtaaccacgtcatgatagaagaagaagaagttgggttcatttttttcccgaatagcacagataggctcgtccgggccgggagctcggataacatatatatcttgctttcctaccggggtagctgctataagggctgggtcaagaatggaaaaggtccttaacacctcgtgagtgacccaaggaaattgggaagccaaaggaggagggctatccgactgggatccaactgagggtgattcaccaacagtctatgaagaaggatccatatatacctacgtaaataaagaggagaaagatcagtaaagcatacctgaaggtgaaaaactaggcgcaggagaggtaaagacagagacctcggcagcagaggccggtcgggaaggtgacctcggtggttgtggtttgatggttgttctagggacgagcacggggttatgccgacaggatccgagtgttgaattgaccatttgttcagacccgagacgcaaatagtgtgtgctttcagcaacacaatcaatgcatgcgtcataccagacttcgataacctcatccgaggaggatggagaaacctcagagggcgaatctgtggggagagaaaagggcttagcagaagaatcccttggaagggctgcaggctggtgaactttagggttacgagggtcagaacccatgacaagtggggattcattaggtgggggtttacacccatgacgattttggggtcgattaacagaggtggtcggaggtttggaaaccttgggtttccttgaagatgaagagcctttggtgtaaccacgcaacaggtctttctgatgttcttcttctgaaagaggcaatccgaaaaaccaccaccctactttgggggtgacagtttttcgtaattgctcctcctcttcaggggtgagtttcatcagaaaagaaaaagaatcgatacgcgacaaggctaatggagaaggaaagaaagagaacaaatttaaagagaaaaatctagatattctagacagttaaaacctagatattctagatatcgaaattgaatgcatagaaggccagaaacaagggtaaatcaaaaatacccagagttgagtctggaatgaaagaggaatgttattgaagtagaaaatagaagaagatgaagaaggtacctattttatgtgataaaactgaagaactggaaaaatatgaatgatgaagaagaaaacgtaaggaaatttgcagagagaatgaaagatataatgcttgcacaaagaggggaaatgacagaagcgatatttgaggaaaaaatttgaaatataaagggaaaaattttaaccgccagttgaaataaaacggtactaatgacagctggcatcattgaaacgtcaggagggtaaggtcgtaaaatattatgtactgttgggggcaaaataggaatcgcaagacattggtaatgattaaaagcatagagtgaaacgacggatactttaatgagcagacggcaggaatagaaacggacatcaccatgtggcaccatcggttcatctgccttgaatgaaaggacgagagtttggtattacccggataagtatcatcccatttcagtcataagtcgatcttgaaggacgaggtgaatatttatgagatagtcggtttgctccggtttcgagaacgatatgaaattttacgactagagcatctcggcatgaaatgcctcggtgaggtgcgattcaggtcgagacacaaagacataacacatcccggcaatcaagactacttgataaccaggctgggggcaactgttatggaaataatagttggccttagtcgtaaggcccaactaagagtgacgagcattcgttcaactgctaatgtgaacgtgggctacaactaagtcagaagggacggttccgatatggagatcgtgtccgatattcgcggatgtggttcacaaacagttgagaggtatgtgacttagaaatacatgatgattgcaacaaaaaggtacacatattcttactttttcttttccttacacaatgcacacaccccacgtctaattgtggttttcgtgttcattgtgatcttcttttctgaggtgtttgttttccataagcattctcagagagagagaattaaatcctatattgatcatcagcaacacttgacggacagttgtattctgtaaacaaatggaacaatttgtattaaatgtcaatgtatatttctgtctctttaagtttttatgatgctgaatgtatgatagattaatggttaaaaaaattctctctctaattttctctctctttattttgttgaggtatctttattttatttagttttttttacttcctttattttatttagttgaaagatgaaaaaatggaaaaaaaaagtttgatttggcatctgttgctacattttgagtatattggaactttcaataattcctaattgtatcgttagggaattaaactttcaaaatctaggagtctattttaatcctggaattaaactttcaaacattcaaattctagtagtctatgttaattttgcgtgcttaagtgccataggtatagagaatcatgacttttatgctacattttgagtatatttgaactttcaataattcctaattgtatcattatggaattaaactttcaaagtctatgagtctattttaattttagaattaaactttctttcaaagtctaggaatctattttaattctttgggcataagagaatcacgactcttttgctatatggttcctcaattgagtctcaattcaactccaacttaaatctttcatttcaaacattaacatcaaactaagacaccattaataaactaaaaatagggatttcacacattaaacatgttacgaaattccctgtgagtccaaattgcataaagaaacggtcaactccacttaaacaacctcatctacacatgctcctaaccgtctaaggtagtggagataacaacactatagccactaaacccactatccagacaaccgaagatcccagatacagataatggatgaggcccactactcaactaactcagataagtattctcaaggctataaatagggacgtcctccatggagaaaggtacacacacattctgactctctcttttccttacacacagtgcacacaccccacatccaattgtggtgtttcctcttgtgagtattgtgatcttcttccctgaggtgttttaccaccatagagatccacaaagagagagattttgatcctatatcaaccgtccaacattattgttggacatttgttcatcttggatagaacaaaacataagattaaagttggtttaagcttcccttacttctataaaccaataagtaaactttgaaaaggagggaaaagaagactttgggtccaagatggaagctttcccgctaccactcaatcaccacataagaggtcaccacccagaatccatcaacaaagaaaaataacattaaaagtcacaaaatgaacactttcatgaacctcccatgagtgctctatgaaggaaaacaaaaatagaacaaagggaggaagaagagaggtccttacctcactaggaaaaatctaaagaacatcaaggagaggagaaaagggcttcattttgcacaaggagaaccaaaactcaagttcccaatagaagggttctcttggagaagaggaaaagagtagatagtgatatttttcatttgggattcagatttacaagggttttgtgaggagtttatgactctcccattttcttctcttcacatctcacacttgactaaacaaatccactttattctcatggctcaagatccactcatctaagctgaaacgttctaaaagttactattcacacattaaataaggtttattgaatacacaatcataatcatatatacaaacattacctcataattaattaattaattatatgcatttaaattaaatttaattactcttgtagtttaattaaatcacttaatcaacattatggaaaacacaatgttacaaccaaaccaagttacaaatgcaccattaacacaaaaaaaaaactgaaaaatagttaacaactacatagttatgtgatataactgtaataattaatcaatgttcattcaaaaaatgaatcagcaccgcacagtaataagtatatcaccaatatcaacaccataccatcattttgaatgctaatatgcaattgatccaaagaatgaatcaacacaacacctcatagtaactatcttcaaattctaatacttgtaatattgggaaaagataaagaatgaaaacatgttgatccactcgaggttatcttaaggatgtaataataataattttatttaaaaatattattgttaaacagattggtccgtcaggctcaatagaattttcttaaggtctatagcttggtctatttaactaaaaagacttttttaaaaagtttgagtttgatctttttattaaacgagtcaagccaattcaagccttaacgggtcgggtcataagtcttcgataggcgatctggcctactttcacccctagtggtaaggagtctaaatagattgcatacggtttaggttcaaacttgattggcaccattgtacgcaaaaaaaaaaaaaaaagatagagagagagagagaaaataggtcatatattatcatcataaaacagttttacattgtcatccaatcacaacttatcatgtatggaaagtttgttgacttttgtgataattactttaaaaagtcatattaaagttgatttgtgattagatgactattaaaattattttatactgtcaatatatgcccattaaactcaaaaatattattaatatgatataatttatctattaatgtatattatcaagatcaaagatccccctaaaaaatcacgtctaggtaaaataaaaaaaaaataatttctgcttaagataaaaaaagttataattggtatgcaaaaggtagactgatattaaaatacaagacattttagaaactaatgctaaataagaaattaatattaaaataaaattctacaaaaaattgtaaataataatgaagaatcttgaccttttatattaagttttaattactttatggtaagaaatgcaaaatttcaatactttatcataaatttaaatattacaaaatatgcatggtaaaaaaatgtttaataagaaaaattgaaataaaaaatgataaaagccaatatattttttatgtgtaagaattaaagacaatgttatgcgatttacaataactcaagtatcctactcaacaattaaactatatctccttgacaaagtcaatatatatatatatatatatatatatatatatattatcaagattatttccaaataattataaataattaatgcttaagaaataaaaaaggataattggtatgcaaaaggtagattatattataaatgcaagttatttttgaaaccaatgccaaatgagaaatttgtattcatgtattgatatagaataaaattgaaaaaataaaataagtaaatcataaataaagaatcttgacctttatcttaaattttaattactattatcattatattatgtctttcaatattttcttgaaaatttaaatattactaaatataaaaatgattaagatgttttaaaatataaaatgataaaatcaatctttataaatgatttttctaattataattttaaaattctcattataacaaggatgttttgtatttgtctaagatttattatttgtttttggttcctccaattttgtaatgcacaccacttttggtcctctaaaagtggtttgacccaacttttacttataaggagaaattaagctaaaaataaactcaaccaagcatatattaaggaatgtatttgattagaattttaaaacactattttaacataagaaagtcttataaattttaaaagattaagtaggaatgttgtgtcttattaaatttttgtaaagtatttttataattaagattttataatttggatttaaatgaatttatataatgaaaatttaaaagatttgaatagatttttatagatttataaaatttaaaagaattttgtcaatttttatattactgagtcatgttactggaatttataaaagatgtgagtttaaatctattgaagaggcatgtaactggaatcagttactggagtgtgattatttggaagataaatcaagtttcgtatatgggagcgggtggagcatgtatagcagcgattttgacctatatatggaattcaggctatagtgatatatatcggtgacgtgggttatgttttatttgtgaagtagaacagcagtggtatttgtgtgtgtgtgcctgtgtttttttattgctgctgtgatatgacatgaatatttgtactctatttaccttatcatgttgtcgaggcgcttattgtgttcaaactggaaattatgaagtagtagtggacgtgattgtgaatgtttgtattgtctttaacaagaaagaaaatattatatatttatatgtgatgtaaaaaaacgaaagtccagaaaccggaagaaaaagaaaaagaaaagctaacaaaatcaaaagtatgaatgaaattgtttaatagatatattattggtaatttttactaaaaagtatatcaaaaaaatctattgaaattcatctaaaaaaatattgaaatttatatattttttaatatcaaattttgtttaatttataaattataaaaaatttaattgaacaccaccatatcttgttttcctcctaaaaaaattaaaaagtactaattaaatattacaagacttattatttaaaagtcttaattaaatatcacaattttttataatatttttaaaatcttaatctaatagatccctcttatttatatttggaacaaatttactaacatggatcaatatcttgtgatcaccaccatgggcggacacaggtgttaaattggggggccccttaaattctcaagaatataaattttttttataataataaaataaagtaaaataaaaaatagtttaaacgtttgtacaagaggaaaaattgaaaagcataaaaaaagaataataaaaaagatgaaaaataagaaatgagtgagtgtggatatgtatgtttgtaacttttatgaatgtagtggttacactcttgttacttttgagcacccatcacatgctaattttgttaattttttctcttttaaattgtacatttttcacacttttgttataataatttgttcctttaattttcttcaaaaaaaaaattttggaggcgccgtctccgaacccccaccactattgcccccccttatttttttttttctggatccgcccctgatcaccacatccaaatggccaaaatcagccaagttactaattgttgttctcgcatacatggattaaattgaatttgacccgcaaacaaacatgcaataaattagaagttgaataagaaaaattgaaatagaaaatgataaaagtcaatctttatacataattaattgtttttgactggattaatttttatttataattgccattatgataatgaaagtactaaatattataaatgatatagatatttttaggagttatatagaagtgatatatataattggtgagagcatgggaagagtgaaattcaaataatatattcaaatgaatagttaacattaaaattaattaaaacaattttgaccatttatatataattatatatattatcaaaattaaattctctaacctcttatagtcttcctaataggtatatgtatgtgtgtggagcaaaaaatgatttacataaactaaagttctattttgctctatgttcaactcaagtgtcctccttgcaaacaagtgaaatctgattacaaaggaggtgatccacaaatggacgagacgaatatgaagaggagggcattgaaccgtgaatatgcaagacaatcgcggttgagaaagcataagcgattggaggatttgaccaacgaagtcaacaagttccaaagtgcaaacaagaagttggtagagagcatcaaggctaaggaggaagcatatgctgagacggaagttgataacaacatcttgagagctcaaaccgtagaattggctgatcgattgcgctttttgcactctatcattcaggttgctgaaaaggccaaagggttatctgttaatgttaagattccaaatcttaagccgtaattaattctgctcccaataaaaccctttatggattgatccttattctctcttgctgttggtgaattttagtaatttaatttgctttatatatactcactaatttgtatgagaacaaagaattaatattctctaagttaatattatataacttaaaaaaaattaaaaatgaaacaaaaaatcgggaacatattttcttacaataattttggtcagaatttttatacactatcaaaattttgtacaacttaacattttttgtgttatttacatgtgtgtatatagtcagagaatcttcttttttgtgatcgtaagtggaataaattttaaccaatagacttcatcatgatagataaatattcaaacacataaataatgtgaatttatttaaaaaataatgagtttttaaatggtcaactaacattaagatggtcaatatatgtattttatgtatgtatgtattgggagaatatttgtttaattatatgcgagtaagagaaacaaacattcaccattatatcttattgtgatttattttttaaaatgtcgcataaattgatatgaaatcatatttataacttttcacctcttagttcctagcttataaggttttaattcccttatcatccgtatatttttgaatttatgattcaaattactcatctcattatcatatcaaaaaggcattttcaacatatatatatatatatatatatatatatatatatataagaaatgtgtttgtaatcaacacggtgtattttaagaaaattgcaattataacttgttaaagtacttcttttaataaataagtttttaaattattcgagtagatttaatcaaatttattattcttggggttgagtaatgggttttaatattaaatccacaaatgaaacacccaactcattcatgtgacttagtttttattttaatttatttatatatcttataaaaaatgaaaacacacataatgatatgactagtagactacactagccttagtttcacactttccttttcctatttaggtttttctatacaattatatacacaataaaagcgtatcaaaattaaatattatatttatttttagatattattatattttttatttttaaattattagatgatgatgttacaacacttgtaaatatatcgtggaaaaaatgaatgctaacattgtgtcaactgcatgtacaatataactgttcaaaagttatatcaaagtttcatttgaaaataaaaattatatttaaatacttaaaataattattaatttattgtacctatagactcaaccgattattaattgggttggttaaattagttcaaatttgataattattttatataaatacaatctaatccaaattattttgatcggatacagtaataggtttgatgaaactccacctaacctatccatgatcactcttattgatttgtatgacatgtgaatgacaatatttctttttaagataagaataaccatattaatatggcatatgatcaatgtcggtccacagaaaatatatacctaaaattacgattgaattacattttaatataattttcaaatgaaatttttatataaatttttaccaatcatatatttctactttggtttattcttaagctatatgaatctaaatggaaaatattaataagggaactaatatttttaaaatattataattttatctatcattttttaaacttacttaatatgtattttttcttaaaacatcacaaattagatcaaacttcacaatcaaataaatttttttaaagaaagtgaatgaaatctagcgataaataatttcattacatgtgaataaaattaaagttttatataaaggtacactaaataaactatttatgtaagagaatactaatatctacattaaacattgtaaatttttataattaacttaatttttaacaaaacaatgtcataaaaagtattagatatccaattttatgttgccattaaacattaatatgcatgcaatcactactgcatatatgtgacttttaaaaatattaatgtgttaggcaaaaaatattattgaaagcttttgggaacatttaaaaatattgttaaatatgaataatatatgcatatttaacaattgcccaaaaaattttaacaatattattttaccttaacacttattaaaaatattattaaaagttacatatgtagtagtgattgcatgtgttgtgaatccttggtagcaaaaaataaaaataaaaaaatgcatgcaatccttcgtaacatgcaatgacgacctttcattactgacaacaatacttaaccaaccctatctaataatgataatgaacaaaatgaaaaagcatcatagtacaaagattatttttaaaaatatgtataagaaaaaaatatttataagaaactaatgttgattctattagaccataaattaaattattatttaaaaataggccagtgagttaggcaagcctattataattcaagaaaaataattttagcaaattaaaattaagtgtctaaaacatttatacaattaattagtattatgatgaaacaattataacataaataatttaggttttatataaaattagagtatttcataaatttgattttctcatgttttaataaaatatgattttaagaagaatttgataatgcaagtcaagtcaatttttaaaactaatattaaataaaaattaatattcatgtattgacatttaaataaactttgaaaaaacagataaacaataaatgaagaaaattgatttttatattaaaatttaattactattgattctatggtaagaattacaaatttagaacattttttcataaatttaaatattacttgtacttaccaaaatatgaagctaaccaatgtcaggatggacgttgcgaaaaggggctcctaggtcttgcatgtcgaactatgagtagcctttgttagggggacaagagggggaacctgcaaaacaaaggattctgacgctcaagtaactacgtgagtccagtgagaatgagatgaacatggtgagatagaacctgatatttatagagtgagattcgagtttcgagcccttgtttgtcgaggttgttacattgagtaacaaccattgcagataattcctagtttgtagataatatctagtagataagttgtggcttatagataagtgctagtaaattatctatagcttatagacaatccgatggattatagataatctagtgcttataaataattaagtaggttgttacgttatcaataatattcaaatgtggaggtattagagataacctgttcggctcagtatctcagcttctaagggcgagttgtccatgctctgtcgttggttatgaatggatgagagacaatgttttgaaatatcactcctctattacctttgcggcgagtgtcgttgctctggagcgttaactgaggttggataatccttaagattccagcaagatggtcgtctaggcttgcgggaatgatgattctccctttctaagggtggcgccaggttgtctgcccttcttttttatgtactgatgcctctttgaggtgttggatttaattcttcctttgaaatctttccaatgtactctgcttgagtagttgaatgtggtcccgttctcagcttcatcccaatagttgggctattgtgagggccttcgaaatcttgtgtccttcttcaacattcgaccaagtgtgtcggtgttcttgtacttcttcaaattaagttggcaagcaatattggctaggtttccttaaacaacatgtctaagaagctatttgagtttgagtcgaacgtgtttcaccatttcaaggaccgtttcttcaaggtcttggctactgacgacatggatgatggattgccattgattttcaattgggatggggagcctcgctttccattttactggcattcagacaccaccaagttcaaatctttcaacgaggatctgttgacctttgtggagagggttgacaaagccattatggaacaactgttggccttgctagatgcgggggctatcttgtctcttccttcagcggacgatcctctcgctactttggatggtaagacattttgccttgtcttcgtctatgtttgaggtgtttaatgttggccttaactaacatttgttgtgttttccttgttttacaagtataatgttcaaattttgtttggaggcctttagtgaagcacgttggtcctgctggtggtacagtgccaccttccgctgtcgaccctcctgctgaaaaaggagggtcaacctactactagggttgaccccgttgattatgtaattgttgaggtttcccccaatacaccttcctctattttagctaagaggaaatgacatgataatgctagggtatcaggccacaagaatttgcctatgactccatcgaccgtccagactactgcagctgcttcttctactcctttgattcatccttcctcgtttgttcagaaggcttttgcttcccctaccattgaggctactgcactagtttcttcaatcggccctgtcgtggctccttttgggacaaaagacttgagcaggaaaaagagtacatcattcgttcttgcattaggttaactaaaatagaactttagatgggtagcattccatattcttggaattgctttaccatctagttcttgaagcttgtctactccgttttctaggcttgctacaactcagaatgggccttcccagttgggtccaagcttttcctctcggggatcttttctagcttcacctcagactcgctatacaaggttgctaggttagaaggctcggggatgaaacttggtgttatatcttcttgatgtttggggcttggtggtttcttctttgattttcgccatttcttggactttgtcttttgtctctagtttaaccctcatgttttcttcattgtgttgttcctagaataataacctccttgtcgatagttccccgacttcgacaaaaatcatggcacatgtgccatatgtgagtcggaaagaagtctcatcagttgctaactggggtgagcagtgataggctcaaattatactggggagttcttccatccatagacccttagacttgttaagtcttgtgcatagggccctaaggataactttgtttgctacttttgtctaaccgttggtttggggatgcttgacagaggtgacaaggggtttgacacctagccttatcaggaagtcttcgtaagcctgagctttgaactaagtaccattgttggtgacaatgtcgtaggggaggccatatctgcatataaggccatatctacttccttcacctataattttccctttgttgttgtctccataagtaacatagcccccatctttaagtgtaagatttttgagcaagaacttgtcaccggtcatatgtcttgagcagccactatcaagataccataaggaagaacttgctctaagacatacctacaaaaagaacaaatcacttcataggagaaggtactcaattgagtttggatccaaaggggttagttgcttgctttttcttttctacccaaatacactcaccatttgggacataaaatcttcttgcaaaacattggtaagatgtatgtcctctttccatacaatagtgacaaacaacaactttatatgagtttctaaagaacctcttttgattgaatcttggtttctttttcttcttttgttctggaggtacaaatgttgttttttgaacacttttaaagctctttttgtaccccaatccagaagtgtcacatactgtttttgagcactcaacatatccttcaaatcactttttcctttgttgagtttttccaagatatcaatcaactcattgttttttgaaacaatctgcatatatttttcttcttgattcaatttatactcatcaaaaactttttgcagcatttcatatttgtcactagttgtagaggaagaagcacaaacacaaccacttgatttgtagcttgaagtaagtttctcattttcttccttcaagttataaactttagtttgtaatgccacaattttcgcaagatgatcttcaatgtttttctcgagcttattgttggatttagcaagctttttagcctctttatgcatctcttgaaaagcaaaactagcttgatcaagttcagaggttagctcatcatcttcatccaagagattatcattctcttcattaacaattgaggtgaggcacatattgacttcttctaattcagtggaggattcggaagttgaagattcattgtcctcccaagcaatgtaggctcttcttggctttgcttccctcttgcctttgctgtcattttgttgtttcttcaagtagattgaacattctgactttatgtggccaggtttgccacattcaaagcatgtgaagttgttgtcaatcttcttgatgttgctagtgttgttgttagaattgttcttgttgtttcttgtaaatcttttgcccttgttcttctttagaaacttgctaaactttttcacaatcaagttcatgctttcttcatcttcctcatcacttgagttttcttctttttccatcttaggtgctgcagcttttagtgaaattcctttgccttttctttctgcatcttcaccaaaggttagttgagataattctaattcatactcaagtaacttaccaaagagggcagccatggtcatttttaaagatctttagattctttgatggctgtcacttttggttgccatgctctagtgaggcacttcaagattttgatgttcaattcttcaacatcaaatgtcttcccaagtcccaaaagatgattcactatgtgtgtgaatcttgtttggagttgagatatgctttcattttggttcattttgaacatctcatattcatgtatcaaagagtgttttcttgatctcctcacttcttcagtcccttcatgggtgatctctagcatctcccacatttctttggcgcttgtacatttaacgattttgaagaattcatcagaagaaagagcagaagttatcttgttcttagctttaaaatcatactgaacaatcctcttttcatcatcattcatctcatcccactccttgggaatcatgttattatcaaccactttgatggacaccctaggacccttttctattgcattccatgctcctggaacattggattgaataaagatcttcatcctatttttccaaaaactgaaattctccccctcaaacaaaggaggtctatttaaggaggaaccttccttgaaggttatttgtgaagtattcatttttgaaagaaagtgatcttgagtaactttcaagacctagctcttgatgccaattgtaaaatatggaaacacttcacacttaaccaagaagggggggggatgaattggttaggcttggtaatttaaaaattttcttgaacaaaatcagagtttttccctttggatctttatcacttttgaaatcaagaacctttattcaatctaatgctcagtccaaggtatccaatagccaaagaatttgttgataacaaaaacacacaatcaagaataacaaaatataaccaatttagagaaaataaacaacacacaaagatttatactggttcacttcaaacactatgaagctacatccagttttcttccactcaacactagaatggagttccactattgcaattttcagtttatcaaccctagataaagttcagaaatctaaaaccctattagattcttagagacaacccattgagaacactactcagtttatcccctagagaaactctatctctagattacaagcaagaaacccaattacaatagacaaacaaatacggaattcacaacagatttacaacctcaaagtttaaggaaagaaatcacctgatgatccaatgagtgatatgcatatgaatgattacaccaggttgaataatgaaaacaaactcagaacatcactttccttaagctttgaaaaagaaacttcttacttttggaatcacttaacaacccataagtgttcttgtgaaagcaagaattctatgaacccagaaaatcactaaaaagaatgtttagaaagccttagaatgctcagaatacgaattgatcaagtttttaaaacagttgagcaaaggttctataaataacaaactttctaaccgttagtaatcaattaaatacgctcttgtaatcgattattttgcttatgtaatcgattatttcaagactgtaatcgattaaactgttcaacaaatttctaggtataagcaacgaacaatataatcgattattctgacttctaatcggttaaaccagatagttgctcaaatataaaaacactgtgtaatcgattacaaactttgataatcgattaaaccaggaacctgtataaaactattttgaactatgtaatcaattactgtatttggtaatcgattaaaccagtagaacatgttaactatagcatataatgtaatcgattactattcctagtaatcgattaagacaggaaggtgatatattttgattagcctatgtaatcgattacataatgttggtaatcgattaaactgttcattaaagttgtttataagataactaaggtaaaataatcgattattctaatatgtatgaaaaatgaatagaacacttcaatacaaccaagatggggggtgaattggttgaaccttggtaaattaaaattttcaaatcagagttttttccataggatctttatcactttaaaatgttttgaaaccaagaatcatctattcaatcaaattcctctgtcaagaaatcaatgagcaatacaaaactttctgtgcaaacaatttgaatcaccactaaaataattgagagatgaagagataagaagaaagattagccacagatttttatactggttcacttcaaacactatgaagctacatccagttcttccactcaacactagagtagagttccactattgcaaaaatattcttacaagatattacaagcctctctttatcaaccctagataaagttcagaagtctaaaacactattagacccttagagaccaaacccaaactgagaacactactcagctttccttagagaaacactatctctaatcatgtaagaaaacccatttacaatagactaatctttacagaattcaattaaaagaattacaccttcaaagaataaggaaagatttcacctgataatccaaagaacatatgcatgtgtgtgataaccctaagtcccagcacgcttggcgcgagtttgggcgcgtatggcgcaagtctggggacgtttggcgctggattctgcagaactgtggcgctgatggcgccgagttggcgctgatggcgccacatttctggtgtgtggcgccgatggcgcgggagcgacgctcccagcgccagggtctctggtggttgacgcctggggcgctaggctagcgctggtggcgccagaccactctgagatttgcagctggcacggttggcgccatgtatggcgcggttggggccggaggttctggaggtcagcgctccaagcgcgggagttggcgctgacggcgtgggaggctctggaggttggcaatcctggctcgggaggtagcgctcctagtgccagaagttctggaaaccggcgctcttgacgcggggttggcgcagatggcgccgtggtcacctgcagctggcgcgatcagcgccagagtggcgcgatcagcgcagctgctctggcagggccattatataaagtggatttcgcgatttctgagccccaaacttcctcttctccttcctccagcctctttcctccattgttggacctccaagcttcattctttcaccatatctcaccaaaatccattccttaaacacattttgtgatggaaatcacttctagagcttgaatccatcctcattcctccttaaaaacccctaaatcaaagaatccctttctcaagggaagttcgtgaaactcgagctcggcgaggaacgacgacgattcgtgagtacccaagctaggggaagtcgtccttgagcattccttgctaactttgaggtaagaaactcgagaatcacctcttgatttataagttagggttttgggtgaatagtgaccaacttttgatagagctagttttagctttgggtcatgttgaaacatatgcttagaatgttgagaggatgtaggattagctcttaaatgtgaatttggtgaaccttggtttcatggctctatgtaaagcatgtgtgttgttgtgggctgagttgcttggccacattgtgacatgctagagccttggcttgtggtttagatggccttgagaggctattggtatgatggcttgtggatgctaagccttattgaaccataggatagaagaccttgatggtttggaaaggattgtgattcctttcattttgagcggttgtgaaccgtgtatgatggtatgcattgtatggatgtttgatacatgcttgtatgtgccttgttagggcgtgacaccatgggtgtcagtggcgtgggccacagagcaagggaagaaccgcagagctcggctttgccaggtaagttcttggaaccttggggatgtttcccacttgcttgtgcttcaccatactctgagggagtagtggttacattcatgatacatgcattgtgtggatgttactcataataatatatgcttgtatctgtgcttgagaaatgtattaagcctgtggttagatcttctggccagttaagatagatatgaacctccctaggagtagagcgcacctcctagtttggtttgctcatggttgactgggtcccggggtgaggatgatcccctaagactaagagataagtgtgtcccatcgcggttgattgcctattctcggaggtaccatatacgtgcgtccatgtgtaagggatagctcccgatgggatggcacaggtgtgaattccggtttcacattgaggttggtgttgactcggtccgccgtaatagagcttgatagcttgcttgtgttgttatgataggccgggaggcctagatggttgtgataccctgatgacttgtgtcatggtgagtgagccagggtggaggagatgcctccagggaccctgagcttactgagatgtttatctcaccccgtgtggggcttatgctttttcaggtgatgcttctggtagagaggagcggtctcagggtgggaggccccagtagagacggtacctgcttggccttgggcaacagtggatggcttggagctcggctcagctgtttgtttatgttttgtacccctgtagaggaaagacatgtgttgtacatgtaattttgtgttgtatatgtatgccctcgtgtgaggaaggatcctcgggatcagaaagcgctcaaacgcttattcttttgtatagacacctcgggtgtcagatgttgatgttgtacataacctgatttgttatgtttatgttcctcttgtatatttatatctttgagatattgtgctttctgcctatggttttgttgtatgatttggttaagcaggggcttgttctatgctttgtagtgggttgtgtttccatacataatgtaatcaagaagtatggttttggttttatgcttccacgataaaaaggtttttaattaccgtgattaagcgctaatctgatataatcataatgataatacgccgggtatacacggggtgttacatttaatggtatcagagcggtttcttgatggaagcattatgtatggatattaagtgttgcttttgactgttgtttgcatttggcatgaccattgcatgtgtggacactagttgtgggcctgatcaactcactatttggtgtgcatgtgtagtgtcatgacgaggtcgagaaacaacagtggggcaaccaatgcccaaccagatccagtggcggctgctttggcagccatgcagcaagagatggctgcgaataggcaaatgcaggaggcgatgcagcatgagatggctgctaaccgtgaggtgaacgaagccttgatgaaggcaaatcgggagatgatggatgagatgaggaccatgagaggaggtgaccaggccttctctgtacctcctactcatgagggtgatggtagccgtcactaggctagtggtagccatgccagaggggaccgggtgtcccatgctgaggctagtggtgaggttgcaaccagaaggaagatgcttatcactttcagaaagcatgaccctccagtctttcatggtggctatgaccctgttgctgcggctagatggctgcaggatttggacaagatcttcacggtgatggagtgtcctgatcatcagaggttgctgtatgcgacctatatgctgaagggcgatgcccatgagtgatggatgaccacacttcagttgcttagaggccggggagaggttgttacctggcctacttgcttcctggatcgctattttcccagggatgctagagagcagaagcaagcagagtttgatggtcttgttcaagggaacttgactgtggatgagtacctagccaagtttactgagctggccaaatatgctcacttccggagatccttacctgaggcggatatccttgctgctaagttccagaggggacttagggagagcattgaggagcaggttgtcggtagtggagcccgtgatatggatagcttggtgaggcagtgccgccaagttgaggacatgcttcgcagacacagaggcagtcagtcttctcccttagacagacaggaagggaagaagaccagcagtactggcccacccggaaagggtaagggcaaggatgtgagagtctccacctcttctgggaggttcaagagggactttagtcggagcggttcatctcggggaaggcgagccccgaagtgttcagcctgtggaagggagcattgggggacgtgctcctcgggccagatcatatgttacagatgtggccaaccaggtcatatttctcgggagtgcacacaggcaggaggccgtgcatcggttgctacagtcgagatgccagcacccacggcaggtcgggtgtacatagttgatgccagagaagcagccaggactcccgacttgatcagaggtacggttctgatcgatgcttgtgatgtgagagtcttgttcgactctggagctacacattccttcattcaagatgtgcttgctgataggctcaagttgcctatgacttgtttttcctctccgatggaggttatcaccgcatctagtgagagatgtcgggtgagcacgtgttgcaaggacgtgcggttccagcttgatggcagagagtacatgattgatctgtactgcttagctatgcctacccttgagatcattctgggtatggattggttagccaaatatggcgtgatgctggactgttgtctaaagagggttgtcgtgccttctgacagagctggctcaagttccacttctttcctatcagtcttgcaagctcgtaaggcactcagggaaggagcttagggttatatcttcacatgtgtggttgaagataagccaagtgttgatctgtcgcagatttcggtggttagtgagtttgcggatgtgtttcctgaggagatcactcagctaccacctgagagagagatcgagttctccattgatctggttcctggtgtaggacctatatctgtggcaccttaccgaatggctcctttggagttgagggagatgaaggtacagttggaggacttgttgtccaagcagttcatcagaccgagtgtctcaccgtggggagcaccggtaatctttgtgaaaaagaaggacgacaatatgaggctctgtgtagattatagacagttgaataaggttactatcaagaataagtatcatttgcctcgtattgatgatctgctagatcagctgaggggagctacgatgttttctaagattgacctgagatccggatatcaccagattcggatcaaacctgctgacataccaaagacagccttccggtctaggtatggtcacttcgagtatcaggtcatcccctttgttttgacgaatgcccctgcagtgttcatggattatatgaacagggtattcaggcctttcttggattagtttgtggtggtatttatagatgacattctgatctactcccggaaggagacggagcatgctgagcatctcaagattgttctacagatcttgaggaatgatcagttgtatgccaagttgacgaagtgcgagttttggttatctgaggtgaagttccttggtcatgtgatctcagcatctggggtatcagttgatcctagcaagatagaggcggtgatgtcttgggagagacccaaggacgtatctgaggtttggagtttccttggcttggccggatactaccggaggtttattcaggggttctcccagatagtgatacctctgactcgactcacgcggaagggggttccgtttgtttgacccatgagtgcgagcagcgctttcaggagttgaaggaacggttgaccacagctccagtgttgacccttcctgaccctaaggggagctttgaggtatactgtgatgcttccaagcgggggcttggatgtgtgctgatgcaggataagaaggttgttgcctatgcttccaggcaactgaagcctcatgaggaatcttatcctacccatgatttagagcttacagctgtggtgtttgctttgaagatttggaggcaccacctgtatggtgctaaactggtggttttcagtgaccacaagagtctcaaatacctctttgatcagaaagagctaaatatgagacagaggcgatggatggagttcctcaaagactacaagtttgagttgagataccatcccggcaaggcgaatgttgtggctgatgccttgagcaagaaacatgtgagtgcagcctgcatgatgatctctgattgcaagttggttgagcagttcagagacatgcacctgaatgtggctgtgggtgctcatggtcttgagttgagcaggaccaaggtgtctaatgacttgattcgaaagatccgagagacacagaagcaggatgaggctgtgagggccatgattggccaacaggatgtttcctgggaggattatgacttggtgttgtaccaagatcgtattgtggtgcctaagggcgagttggtggacgtcgttctatctgaggctcacaagggccagttcagaattcatctaggagccactaagatgtatcaggacttgaagaggaatttctggtggccagggatgaagaaagacatagctgagtatgtggctaggtgcctggtgtgtcagaaggtaaagattgagcatcagaggccatctggtttgttacagcctttacaggtcccgaaatggaagtgggatagcatttccatggactttgtagtggggttaccgagaactcagggtggatgtgattccatctgggtgattgtggataggctgaccaagtctgctcatttcttgcctatgaggactgactacacggcggagaagttggcccagttatatgtcaaggagatcgtgaggttgcatggtatccctgatagtatcatcagcgacagagatccgaagttcacctctaggttttggggtgcgcttcaggaagcttttggaacccaactgaggctaagcacgacctatcatcctcagatcgatggtcagaccgagaggaccatccagattctggaggatatgttgagggcctgtgccatggagcagggcactagctgggatagatacttacctctggtggagttttcctacaacaatagcttccatgctagtttgggcatggccccctatgaggccttgtatggccggcggtgtaggactcccatgtgttggacggaggtaggtgagaagcagcttcttggacctgagatggttcaagagacctctgagcaaattaagatgatcagagataagttgatgaaggctcagagtcgtcagaagagctattatgaccatagacacagacccctgcagtttgaagagggtgatcacgtgtttctgaagttatctccggtcacgggggtaggacgggccttgggagtaaggaagctgagccctaggttcattggcccctaccagatccttcagagagtagggccagtggcatataggctagctttacctcccctgttggcggggctgcatgacgtgttccacgtatctcagctgaggaggtatgtagcggatccctcgcacatggtagggcccgatacggttcagattagggagaatctgacgagtcctactagacctatgaagatcttggatcggacggagaagcatatccggagcaagaccattcccatagtaaaggtgcaatgggaaagaaggacgcttgaggaagcgacttgggagcgggagcaggagctgttgcagctttaccctgagttgtttgacaagtatgatccttggttttgcgaacaaaagtcctaaaaaagggggttgaatttgataaccctaagtcccagcgcgcttggcgcgagtttgggtgcgtacggcgcaagtctggggacgtttggcgctggattctgcagaaaaccttctgcagaattcttcttcagaattgtggcgctgatggcgccacagttctggtgtgtggcaccgatggcgcgggagcggcgctcccagcgccagggtctctggtggttgacgcctggggcaccaggttggcgctggtggcgccagaccactctgagatttccagctggcgcagttggcgccggaggttctggaggtcaacgctcctggcacgggagttggcactgacgacatgggaggctctggaggttggcgctcctggcgcgggaggtggtgctcctagctccagaagttctggaaaccggcgctcttgacgcggggttggcgtggatggcgccgtggtcacctacagctggcgcgatcagcgcggcagctctggcagggccactatataaagtggatttcgcgatttctgagccccaaacttcctcttctccttcctccagcccctttcctccattgttggacctccaagcttcattccttcaccatatctcaccaaaatccattccttaaacacattttgtgatggaaatcacttctagagcttgaatccatcctcattcctccttaaaaacccctaaatcaaagaatccctttctcaagggaagttcgtgaaactcgagctcgacgaggaacgacgacgatttgtgagtacccaagctaggggaagtcgtccttgagcattccttgctaactttgaggtaagaaactcgagaatcacctcttgatttatgagttggggttttgggtgaatagtgacccacttttgatagagctagtttaagctttgggtcatgttgaaacatatgcttagaatgttgagaggatgtaggattagctcttaaatgtgaatttggtgaaccttggtttcatggctctatgtaaagcatgtgtgttgttgtgggctgagttgcttggccacattgtaacatgctagagccttggcttgttgtttagatggccttgagaggctattggtatgatggcttgtggatgctaagccttgttgaaccataggatagaagaccttgatggtctggaaaggattgtgattcctttcattttgagcggttgtgaaccgtgtatgatggtatgcattgtatggatgtttgatacatgcttgtatgtgccttgttagggcgtgacaccgtgggtgtcagtggcgtgggccacagagcaagggaagaaccgcagagctcggctttgccaggtaagttcttggacccttggggatgtttcccacttgcttgtgcttcaccatactccgagggtgtagtggttacattcatgatacatgcattgtgtggatgttgcatactcataataacatatgcttgtatctgtgcttgagaaatgtattaagcctgttgttagatcttctggccaattaagatagatatggacctccctaggagtagagcacacctcctagtttggtttgctcatggttgactgggtcccagggtgaggatgatcccctaagatcaagagataggtgtgtcccgtcgcggttgattgcctattctcggaggtaccatatacgtgcgtccatgcgtaagggatagctcccgatgggatggcacgggtgtgaattccggtttcacattgaggtcggcgttgactcgatccgccgtacatagagcttgatagcttgcttgtgttgttatgagaggccgggaggcccagatggttgtgataccctgaggacttgtgtcatggtgagtgagccagggtggaggagatgcctccagggaccctgagcttactgagatgtttatctcaccccgtgtggggcttatgctttttcaggtgatgcttctggtagagaggagcggtcttagggcgggaggccccagtagagacggtacctgcttggccttgggcaacagtggatggcttggagctcggctcagctgtttgtttatgttttgtacccctgtagagggaagacatgtgttgtacatgtaattttgtgttgtatatatatgccctcgtgtgaggaaggatcctcgggatcagaaagcgctcggacgcttattcttttgtatagacacctcgggtgtcagatgttgatgctgtacataacctgatttgttatgtttatgttcctcctgtatatttatatctttgagatattgtgttttctgcatatggtttgattgtatgatctggttaagcagggcttgttctatgctttgtagtgggttttgtttctatacataatgtaatcaagaagtatggttttggttttatgcttccgcgataaaaaggtttttaattaccgtgattaagcgctaatctgatataatcataatgataatacgccgggtatacatggggtgttacaatgtgaaagatacaatcaggttgaaaagaaagattacagactcaatgcattcctttaattaagctttgaaaaccaatgatgcttcactcttcaaatcattaatccatacgaatttgtgaagcctaaatgtgttctgaaactcagataactcactaaagaaaacttatgatcgtttgtgattgcccagtattcgaaatattcaaaattacaaagaacagggccatgggttttatttatatcagctttctaactgaaaatcatcaattaaacacgctcctataatcaattatttccatatgtaatcgattaattcaagaatgtaatcgattaaaatgctcctgatatgttctggctttgagctatgaacaatgtaatcgattattccgtggagtaatcgattaagacaaacaaacatgtttttcttaatacactatgtaatcgattacataatttggtaatcgattaagtcagtcagtcctatattctcaaatgtactgtgtaatcgattaaaccaacagtacatgtttctcataggcatagatgtaatctattaccaatttctgtaatcgattaaggcattcagcatgatttttctatttaagcctatgtaatcgattaattcgatatgtaatcaattactttgttcttgatttgttttccagaaggcacaaagaacaaaataatcgatgctatcaatgttgtaatcgattaatgcagtaaaacatcatatttccaaaaacttatctttttaaatgccttacttgttaattacttttacttagacctttaatctaacaatcctagatgaatgaatatgcatgatatgcttttggattatcagattacacaactttccttttacatgaatcaaattgatcttcatggctttttgacatttttccaatgaggcatgttgaaagcacaaaaccaccaaagcttgatccttgttcattcatgcatggctcgtcttgaatcaacaatgtaatcgattaatttttgttcttaaacagttttccagaaagcaccaagaacaaaataattgattctttttgaaatataatcgattaatctagtagaaaacattatttttccaaaaactcttgatttatttcaaaaccttgtaaattcttttactcgaattaattcccttaatgaatgatatgaatgcaatgcacttggatcaccataaatgcttcttccttttacattcaatcacaaattaattttgaaggcttcaaggcatgttaaaagttcaaaaccttccttcttgaatcaatctttgcttcgtgcttcaagcagctcctcctgagttcaacagttttgatgttttacatgcccactcaattgatggcatttgtaatttcttgcttaagcttggttcaagtggttaaagcttcataatcctcactaaccttgattaattcatgcattcatacatacattttatcatgtttaatcatatggtaataagtatctagatataaaatcataaaggcaattagatttttataaaaactaattttcactgatttaatcgattacatatatgatataatcgattaaatgcatgtgtatgagtctgcatattgccttatgaacattttaatcgattaccattgatttgtaatcgatcaaatgtgctcaacacaaaaatggacgttatctgtgataatcgattacttcacggaataatcaattatctgagtctctgcatattttataaaagcatttttatctaatttaatcgattaccagatatccgtaatcgattaaatatgcattgatgtgtttttaacatggtgtgtgttaatcgattaaatgggaatttaatcgattacccatgtatattagaaaactcaagtcatctggaataatcgattacaagatgacttaatcgattattttgttcatgacatatttccatatttctgatgaacacgttaatcgattatctggttaaaataatcaattacctcagtaaaaataatcgattactttgacgaaataatcgattacaattagttgagtatgtttttttataaatagaacaactaggactgagttttaatatgaagtattttgtgaaatattcgtacaagccttgagaaaaacactttctagggttcttaaaacacaaaggcaaaagggagaagagaaaatcataaatgctaagtgtcatggagttttacatgatttgttagtcatccttcacatggtgtgaaaagttgtttaagttttttggttaaataagtgtcattcctacaagtcatcacttcttgcgcacaccaagaagtgaaaacatgaaagggatacacacaacaaaaaaaacaatacaattctacacccacttaatcactacagagagttgatgtctcgagaaatcactcatctacaacagttctccctcgagacattaacacttatcattcactatttgtattcttgactgcttgccataatgttcctttgcacttcacaaattatccagatggccagtctgataactcatgaccaggcattggaacttatggtataacagacattagaattacaaacatgttatgatcaccccaataaatctccacaacctatgcatctcaacaatgtatgcaagtctcaaacaataacaatccaaacaaataccaggtagtcaattactccaaacatcaaacatccaacaagcaaccacagattgcacagagaaatatagcagactcacaactcaccggccgaaaaggttcgacctgctctgataccactaatgtaacgacccgcctcgtcgctacgatcacaaactctagacgtgtaagtttcaaattttaatcaaaacttcattagtttgattatgaaaatggtagtaagtttttcgcaataatacaatcatcatacacaagatacaagtacaacaattaaatacatatgtatacatatactatatcagtactcatcattcacatgtttagaacttaatttagtttttcatgtaattacaattcaaaatatacatgtctacaaaaaagattaagggattaactatgaaagagttaattaacaaaatataactcttccaaagagagttccaacgtcattacgtcggcttggtgatagagtgcttttagttgaatatttttctatccttcttagcttatttgacctctcttggacctttattttcctattctaattcagtttttggcctaggcaagtaagtgggcttaattcctaattgttgcgtatttacgggtttttgctcacttgacgtatctgacttgtgcaggacctatagggtgctacagatctccgaatggagcgttctgtcatttagagggtcattttaagctttgaagttagcacctctgcacttataattttgggctgcgaatttgactttcatggttgtaaatagcaaataattagattgttgggtttgtttgtggcccattttattttcagaactcggtcactacatatattagtgactttagtgaaacttggagcacacttttcattttaataaaaacagttttgcatttacttttcttaagtttttaggatcaaaacccttactctcattttctctctactgttcttccttgttcttcattttcgttttgccgtgcttccattttcgtgcaaccatttcatggggctttcactaatgatgatcatggaaggctaaatcctcaataaatccaagaatccaacccaagcacaaggagaatttgagttctggtttagtatttcgaattctatttgaatgttcatcttcttcaattgctattctgttttcatgattatgaatgcgtttaggattgaaaatggattaggttatggattcatttcctaattttgaatattaatcacagattaattggatgatatttcagttagggttatggtttcaatcaatttaagggttaagtcgattgagttgcttctaatgagattgaatgaactttcatgataggattaatttctgagaacaatgatgattcgaattacttggtgaggtgaattggattgatgttttaaattctgttttacactacttctcttgaattctgttagtttctgtgttgctctttaattttagtttacgtttttgcaagttttacttacgcacacaaactgtttgataaaattccccccttactgttattcataaattgaagctagaaccatattgattgtgtctctgagtcgacctaggttagctctgtgctacagaattaacgtagttaaattgttttggtgcgtgtcgacaacgtgatatcaaaattggcgccgttgccggggacacggttcattgtgtgctagctttaatttgctgtaaatagttcatagtagtatttatatatataaaaaaaatcatttgcatacattcactgcatattgacattttgttgcataattgcactttgtcacatatttgcattattgttgctgtgcattatgaagtatgaatgatgtagtttgtatgttgtcaaaaaacagagaaaacagtgaaaaaacagagtagtagtagggagaaagtagtgtagtgtagttgtttttgtagtgtcattttgctgtcccaaaatttttccaacttgtgttgtttgacttgcgatttattttccaaggtttatcccccattttaaacaaaagcaacccttttaagggttgggtgttggttcaaattggcaaattctaactctaagtaagagtttttgaccagtttttacaattggcgtaggggcattttggtaatttcacaacaaactatctcagaattgactgaaattttaccagaaggtgcagaaaattcatacatcaagttgaacctgttatcgggtaacacgttcaccagggggtccaaatcgccaaattccatcgtttagaccatttttttaggcaattttctaatttcatgatttttaaaaatcaccaaaaaaatcacaaaaatcaatcatgatttttagacattcactattatttttttagatttttttcaaaaatttttagggcagttttccaatttctatttcatttcagtatatatagttggtagtgtcctggtagcataactgtttgatatttctctgctgtctgtgtttattgttccttatgagctgaactgtgtatgactaggtccacatcaagtgaattacattcatttgatcctgagatagataggacatttcacagattaaacagacataaccctaggttagatgacttagatgactttgatagtgtagttttagacagtagtgtagtatcttctgactttgattctgcatctacttctacttctacttctacacatcttgatatcatggctgataacaacctaactcttaaggagttagctacacctgatgttgtttaccaaccttggtgtattcaatacccagagactgaggtcagttatgaactgaaatctagcttaatccatttgctttctaagtttcatggacttgctggtgaagatccgcataaacaccttaaggagtttcatgtggtgtgttccggcaaaagaaccaaaacggtgttttttttcaaaatatttaccgataaggggctgtttcacaaatatttacagaaatgacactgtgtaacatgcctagattaaggcatgttacaacatttatagaattggggttgttataacatgcctaatccaggcatgttataacaaccccaattctataaataaggcccgcccaccatttcctcactttccactatctctctagaagtactctgccttctctctagagttttcagtggatatatattatgtgcagtgaagctctgctgaatttcgaagttgttcagagaaaatcttgcaaacaagtaagcgcgctgctctgccttttagtgatgttgttcttaattagttatttatattgttaatgatgcatgtacttattttttagcacaatagatgttaggttagttgataattgttttagtttaggctttaaggtttatttattagaaaaatgttaggatgatgttaatttgttagtgacataaatttaggtggatagaaaattctttagatgtttggtactgtacttttggctaaaattattagaatttaaaatttagggtttgctgggcatggttacttgacatttggattaaggtttgatgatgtgatattcgtttatggttaatggtttagggtttggtgggcatggttacttgacgtttggattaaggttggagtattgttgggtttcatggtcatgtgacgatggtgtgcggtttatggtttggttggccttgtatggtttagggtttaggggttagtgtttggttggccacgtatgtgacgtttagtccagcgttgagtttagggttggtgtcatggttctggttgcatggattatggtttggttcagggttcggggtgcggtcattagggtttatgggtgtaggccaaatggggtctagtgtttagaaatttgttgttttaatgattagtgaattttaaataattgttaacatgggtttttatttttggtgtatgaagttactgataacatggccgatttatctggatctgattcgccgtgctctgtatccgatcataaggctgagccaatggatccgacatcttatgtggttcctaccccatacagatggggcgctctgcgtaggtgtacgcagcgcacccatgtttcacaatctgtgtggaacgagggcacagtacgattactaaagactcaacgtggcaaggcgtcagggggactagcatatgacgacattcctcaagtcatttctgatatgctgcgggacgctggctttcttcatgtcgcacgcatgcgacatattcaggtatggaacacgtcatactagtaatcaaatttgatttaaccataactatagttgtcaattgattaatgatattgttttagattgatgctgccctgattagtgctctggttgagcgatggaggccagagacccatacgttccacatgccacagggtgagatgactatcacgctacaagatgtggctggaattttgggattgcccacggctggcaatgctgtcaccggagtgactttgtccgattgggcagaggtgattgaggacgttttcggtgaagaacctgacgacgaaacagagctgaccggtggatacctacggctgagttacttcgataggcattttggggattggggtgagttggacaaagattttgtcaatgtgacgcggtttgcaaaggcgcacattgcccgccttattggttcatggctgctgagcgatcgatctggaggtagcgtgatggcagcacgctatatccctttgttggttggggatttcccagagatcggaggatacagctgggcctctgcggtccttgcaaatttgtttaggtagatgtgcgagtgtacagatgcatccagaaaggacattggtggatgccatatggtgcttcaggcgtgggcgtggctgagattcccaccaattgctccatgtattctgcagcctagtgacccacgagcgcattttggccaccggtatgtgtgactacatgttcattttataacaactgaaacaattaagtcgtacattgtttaatgttagttgttttgttaacaggtttaaccgactaccccggcttagctcgcacgagctggtgttctacaggacggcctttgaatccctcaatcgggacgacgtatgtatagtgatagtttagtaattgcatgtttgcatttgtggtttatgtcataacataaaacaacctaattttttttttatgcaggtggtctgggaaccatatggagattaccattttgttggtgcatctgaccatgatcgattgttgtggatggcatcgacgcctattatatgtttccacatagttgaagctgcccagcccgatagatgcatgcgtcaatttgggagggatcagccaatcccacgtcctgccatgaagctgaagggtgtgcacgacttttcacttcgtggaaaacgagaagaaaactgggtgcgtaagctcaggccgtttctgaatcgctagcggcaaagggagcagcacatcgaccttccccccccaatccagggccaaatgtcaccaaaacatgagtacatggtatggtacagagaaaatgggaagcggtttatcacaaaggagggtgcgaagatgggtcgtagtgtaagtttcgttttcattaatatttttttatttagttacattaattatcatagttgacagtgatgtttatatatttgaatttcaatttataggttgatgggataaagatgctatacttcgccacacataggcagaatagggcgacgtacgactttgattgggcgcatcaggagttgggtcgcttaatgtctgtataaagacaaagttatcatgtggtggagtctggaccagaagctccagagacgcagcttgaggaggagccacaattgtctcttcaagtcggttgtcgcagaagggagggacgtggtctggagcgtcggcggagacatattcagcaggtccctgagcccattgttgatcccgggcctgcagttgctggtacttttaggcctccagatgtatcgtcgacatatgggagtcaggtgttctatcatgatgggactgagcatagtgcctcctactattctgcggatgtgcctacaccggcggacgcatacggtgtagatgtcgactttggggatgtgcccgctgattggatgcatacgaatgtggaacagatgctcatggagtttgatatgagcactacaggctgtgggagttgggcatccgatgcgccatatgttccccaatctgctgagcatgctatgccagtatatgcagagcagggcactccatgtccagctccttatgtcccatcgtatgaaaaaggatttcacgaggcagacatgtatcggccagatccttatcagccaggcccgtctcagccagaccccgtagaggcaagcagttcacaccgacctcgaagacggagcaacctgataggcaagcgcgtcggcaacagtggccaccactgtcttacttttagttgcttgcttgtagcattcgtttgtaacatttattttattttaatgatgtgtattgtaactattatgtatgttgcatttgtttctgttatttatttttcagtgtacgtattagttagcgtataattgtcgtggactgcacgaattcaacacaaagcttgaaacatcccacacctcagtcagatatagtattattcaggttgattgtatctgtcataatcacaggcgtttggcaaggaagtggcaaggaagcaaagtgaacagagacaagcaaagaaaattgcagctaaggaagtgcttgctaaggcaaaacttgaatgggaaaactaattactcaatattacgtctgatgagtcactatttatcactatttactcatctttctgtactcattttaatccctaatttgtgtttaatcatttattttgcactgtttctcaattaggacttaattggaccgataattcagattttaattaatttggattattttaagttaattatttcaatttttattttcagggcagggcagtttaataattaattgggcttggaattaatttatggacttgaagattagtgcgccacgtcagcatcagcttaatatttcccatatcaatttatggatttcgtttttattttatgcttaatattttccataccagaatatagatttcgtttttattttattttatctttagtgatttttgggccaaaattgttaggaaaaggtccattcttttaggttaggcagttactatatatttagggttctgtgcctatgcagaaaaacacacaacacacaacagacagacaagaacatacagcctacaatacaattttagttcagttttcctttagttttaatattttcgttttctgcttcagtttcagtattgttttcgctttctgcttcatcttctcaatttcaatttcgtttctgttcttaatttcgtttaatgtttcgtttcaattcaatttacgtttctgttgttttaatggaaggctaaacctagggttggaccctaggacagattgcagacctttaatggaggttcttgttcttctaattcattttctgcttgttcttccttgttagagtttttgttctgtatttttcgaattggattcatgcttaataattctggtattgattgattcagaatctcagtttgcttaattctgggagtttgccctaacgaggttcacgtttgcttaattcgtgtaatgacgttttggattaatcttcgcttagttgattaatctggactgataaggattaagcaggacagattatctttcgtgaaccgaggaaattagaggcgcaatctgttctaagggtctgacttgtttttaatcactgcaattaattattatttctgtttaatttagttttcgcattctgccaaaaaccccccaacacgttttcaatcccttaaacactgacaattgatccttgagagacgacctaggagtcactttcctagtactacattttaaactgaattaatttggttgcgtacgaccgcgatcaacgtctgtaaccgaatacgttaaccgtaatcacactatcaggcctaaacactaaacatgaagcgattaaccctacacagaacgtttatttgtaataagaacaataatgtaaaacaacatatttagtgcacatcaggtcattccatttgcatgtccggtttgctaaaaatggctaaaatttcaatgggaccaaaacatttccagtagttcgattctgctatgatcttcaccacgtcttcgttgcttgtcaactcttttatctgatattcgattgtggtggtcgaatattgtgcatggcgtggctgtcggaaaaacaattttctcaccaactgtgacatgtgaatcccatcagggggaaatccaaccggcgtaacttccttgatgacagccttcggtctttccatggtgcatgcagaaggaatttgaaatcgtattggatttgttccagtaaaggcataacccacagaaccggctcttcggggtatgttccactttccgttgtaatatagcattgcatcatgcgttggaacaattgtggattgaagtaggttaagtatgccatcgggtgttctgtggatggcacataaaatttcaattggcccagcactcgacatattgtcgctgcaccttaacattctgcaaacatcatcatcatttgtcagtgccacagaagtaaagaaatagtgttgacctgcatgcagagacggttgtcgatagtagatgttgtcaacgacatggccatcaggaagaattagggtttgctgcagcctactcttgagggtttgaaacgaacaatcatttggaacttgcataggaattggagttgcacataggaaagaaacccctgtttcgtcatgcttcgttgatccactcggataaatgaaggctaacttggaattaccaatgttctgactgctggtttctcctaagaatgccatcgtatgcacactgaaatttgagtgccgagcatgcgagttatatagggctcaatggcgcccaacttgggcgtgttcaatcacgcccaagctgggccaattgaatgacgtgtatttgttgggcgtgttcagtcatggccaagttgggcgtgttcaataacgccaaagttaggcgtcttcaacgacgcccaagttgtacgtatgatgtcagacattgtttgactgcatgtaatcaacatattgttacatcaaatgcatacattatcagaaaaccaaaaaatcaaacatgattacaattataacgttataaagacatacaacagctaagaaaatcatgaagtccccccacggctaggacaaactctccggttgtggccaacttgcttacaaatgccacacctcatatgtctttgggatgtttcaacttcatccatctcgttacgtattctagtggacctgggacgacctttggctcgcagcatcgagctgtcaggtatgatgactggaccttcgcccggtggaatggcccgttcattacatattggttgccatggcactgaatatgcctacaccaacttgcttacaaggaagacgtcgtccacgtactgaaaaggattttggcgcacatgtaaagcagcagctgcggcatgactgcatgggtatttgaatgccttgaacttaccacactgacacacccgatctgcaagggacactgaatatgacttgtcagggccatcatccacctgaaataaagttcgagcaatgttatatctgcgtacatggtgccctaatgtcgatgactgattacgcctcattgcttcagccacatttttgcaatattgttgtgaatgctgaagctgttgggcggccgcctcacctctgtctacgaaatactgaaccattcgggtgtacatgtgtttcacgagagccgtgatgggcatgttcctggctccctttagcaccctgttaactgattctgccaaatttgttgtcatgtggccgtatcttctcccctctacatcatatgcacgtgtccatttctccttggggatggaatcaatccattcggcaacctcaggactgctatcacgaaatcgtgcaaattcgatgtcaaagtcgaccgtcgagggtgtataacctgcaacatcatatacaacaaaatcaacataattctgtttacaaagttttctaaaccaaaagtgtgatcaatttcaaggttttgactcacctaaattcatgagggccttcttcagtcttgcatccttgaatctttgattaaaattgctgacaatgtggcacaggcaaaacacatgatgcgcaaaaggtagttgccaaccaggatgactttgaacagtagatatgatgctccggtggcgatccgaaatgaggcatatattttgcatgcgagtaacgtggaagcgaatgtcagaaaggtagtaattccaagcttccagcgtctccccctcaataacggcaaatgccaaaggaacacattcattattcccatcctgagttgtggaaaccaacaattttcctttatactttccatataaatgagtgccatcaacttgaatgatgggtttgcaatggttaaatgcctcacaacattgtccaaaagtccaaaaaatgcgatgaaacacgtgctttgcccgtaccagtcgatttgcaacgaagtaatcattcatctgaatatcaaaataagaacctggtgcaaaacgaagcatgtagttacaccacctaggcaagaatgcataggattctaccagtccccataaaccattgtcattgctttctgcttcgcataccaggcctttctataagaaactttaaatccgaatgtgttggtaatcctctcctgaaccaatgagattgacactgatggttcctccctaatcattcctaaaaaaaaaattgaacaatcacatcaacaacatgctttgaaaacaaatatgtcttcgaaatgcatcacagtaaattaaaacataccaacaaccagtgaggcaattatgtcagcatcaagttgtctgtgaccctgtgaaacatgatcattcaagcaattgtgttttccaccccattttgaaacaacccacttctcacggaaaactggtttaataaccctaaccctccaagggcaaccatcaatatgcgcaacacacttcatggacaacttgtcaggcttgctctcaaccacaattgcttcttgatgcttcttcatcaagttatgcttcactactaattgtgcttcctttttcgagtcaaattcttgtttcacaaacaaatcatcccctagctgccacggaccctgcactgatcctgaacccgaaccagaaccgccgggtgggtaactccaatcaatatatgtataatgaggaattccttgccagaaaggaatcgcctcagtagctgcacattgaacgtcagtttaagtaacggtatcaactaaaaacaattagacaaccctaacccgtcaaccaaatacccaaaccctaaaccccaatcaaaccctaaacctcaacaacaacccataaaccccaacgaaaccctaaacatcaacagcaacccataaaccccaaccaaaccctaaacctcaacaacaacccataaaccccaaccaaaccctaaacccaacacaacgcactaaaccccaaccaaaccatctaaaccctgcacactttcggttaaacaggatacacttatttaacctaacaaaataacatcatttaatggacattaaaaagcatattaataaacaatataaaacaatttaaatgacaaaacattctaattcacatcgttagctaatttaccttgttctggttgactcaaagcaccctccgtatgatggtaagtttcagatggccccacattaacatcttcctgatgtacaccagcatcctcatcctcatctgacgcactagcatcctcctcaagaagccgatcttccattgcgatattttcatcatcgtcatcctcttcatcctcatccatgacccaagtcgagtcatgtgaatcctcctgagacacattcaactctccaccaacaaatggtgcccctccaacagcatacgatgcacctccagcagcatacgatgcacctccagcagcatatgatgatgtacgatgtggaactgcctggatgggtaaagcaacatcctcaacttctgtgatatcaacgtacaactccaaaaaatctttccttccctggttgcaaaattcttctagtaccaactcgacgtcttcatcatccatatttgaaacctcatgaacttctcgtgttgccataatcttccagtcagtaaagtgattgactggttgatattcagaagtaatttttgccgtatcttttcatgcaattcactcagggttgacgtacgtcgcacagaggttcctcgtgtttccccttcaaaaatcacaccctgttggccttgatattttcttccattccaatataagacaacgcgaacagaattaccacctgaactcatgtttctcgtcactgacaacaccttcaaaaatatatgaaaaaatgaaaaaacaccagaatgagggcagtttatcagaggcagagaacactggaagccaatatatgaaggaactacgggggtccttatttatagatttggggttgctgtaaaatgcctggattaggcatgttacaacacgcccaatctaggtgtgttgtaacatgcctaatccaggcatgttacacagccccagttttgtaaatagtccatgtcacacagccccatttctgtaaatatttgtgaaacagccccttatcggtaaatattttgaaaaaaaacaccatttaggttcttttgccggtgtgttccaccatgcgaccacatgatgtccatgaggattatgttaagatgaaggcattccctttctctctggatggtgttgctaaggattggttgtaccttcaaccagatcctatcaccacttggactgacatgaagagaagatttttggagaaattcttccctgcctctagaacagcatccatccagaaggaaatttgtggcataaggcagttccctggagagtctttgtatgagtattgggagagattcaacaagctgtgtgctacctgtcctcaccatcaaatcagtgagcaattactgattcaatatttttatgaaggattgatgttgatggataggagtatgatagatgcagctagtggaggcgctctgatggacaagacccctcttgctgcaaggcagttgatttctaacatggcagccaactatcaacaatttggtgctagaattacaacaactaaggtgatggctgtcaatgaagcttttgtctctatggttgctgataaccagagattggagaacaaattaactgagttgacatcccttgtgaggcagcttgctattgggcaacaacagaatgtgatggcagccaatcaaccaaggctttatggtatctgttgtgcacctgatcatcccacgaatgcatgccccactctccaagaaacagaacagcctactgaagtttctgccatacaacctggctagtcattcagacctcaacagtagtataatcctactccaacacttataatcctggttggagagatcatccaaatttgaggtatggtcctggtccacaacaacaacagccctttagacctccacagcagcccttctagcctgccactactaaataccaacctcctccttttagacaacagccacagttctagcaacctgcacctgcacctacacctacacctacacaacctgtgcaggctagttttggaccttctttggaggatttaatgaagcaaatggcaatcagcaatctccagtttcaacaaaatgtcagtgccaccatctaggacctgcagactcagattggacagttggctacaactgtcaatcagatgcaacaacaaggttctggtaatcttccagcacaaccagttgttaatccaaagaatgtgagtgccattacctagaggagtggcacggaactcccagatgctggtgctaaaattgatgttggtgctagtaaaaaagttgataatggtgccaaaacagattctgcaccaaaacagattcccttaccttttccttctagggccattcctgcaaagaaagtattggagcttgattctgatttgcttgagactttcaggagggtggaagtccaaacagattccaaaatatgcaaagttcttgaaggacttgtgcacccacaagaggaagcttaagggaaatgaacaagtgaagataggcagaaatatttccgcactgatccagggtaaaactgttgatgccatcccactgtccaccctgccacagaagtgcaaggatccttgcactttcagtgtcccatgcaccattggaaatattacttttgcatatgccttgtgtgatcttggaacctctattgatgtcatgcccacatcagtttacagagcactacaccttggtgagatgaaacccactggtgttgtcatccacttagccaacaggagtgctgcgcttccacttggacttattgaagatgtgctggtgcgggtcaataatttgatcttcccagcagatttttacattttggatatggagaatgagtcttccagccatggtcccacattgatcctagggagaccattcttaatgacagcaaggaccaaaattgatgtgcatgcaggaactgtgtctatggagtttggtgatgacattgttcagttcaacatttttgaggctatgagacatcctgcagaggagcattctgtttttctccttgatatcattgatgctgcagtagatagtgtagatatttctgatttactttctgatttttctgatctttcttctgacttttttaactttgatcttggttcttgtaattgtacctttgatgattctgctgctgtgtatagcatttgtgcggaaatttcctctgcacttcactctaattgtgttccaggtacaaatacaagttctgagcctactatcccactttcctcagcttcagagtcttcccttacgttccactatttagcccccttccttggagctgaagtcactacctgagcacctcaagtatgcatatttagatgatgctcaatagcttccaattatcatatctagtagtctgccactggagcatgaagagaagttgatgcatgtcttgagaggccacaaaaaggccattggatggacacttgctgatcttcctagaattaatccttccatttgcatgcatcggatacccttggaggatgattctagaccagtgaggcaaccccagaggaggctgaatcccactattcttgatgtggtgaagaaggaagtgacgaagctactagctgcagggatcatctatcccatctctgatagcacttgggtttcacctgtccaagtggttcctaagaagtcgggtctcacagttgtgaagaatcaagataatgagctgattccgactagagtggccaacagttggcgagtttgcattgattataggagactcaaccaggccactcgcaaagaccattttcctctccctttcattgatcaagttttagagaggttggcaggtaaatcacactattgctttcttgatggtttttctggttacatgcaaatccatattgcaccagaggatcaacataataccatattcacttgtccatttggcacattttcttacactcggatgtcttttggcctatgcaactcacctggtaccttccaaaggtgcatggtaagtatcttttctgatatattagagagttgcatggaggtgtttatggatgatttcactgtttatggttcctcttttgatgcatgtttggatagtctctctagagtgcttgaccgatgtattagtactaaccttgttcttaactttgagaaatgccatttcatggtgcatgagggtatagtcctaggacatttggtctccagtagaggtattgaggtcgataaggccaaaattgatgtgattacctctttgccttaccccgcttctgtgcgggaagtacgttccttccttggacatgcaggtttttataggagattcattcaagattttagtaaggttgcattgccattgtccaagcttctccaaaaggacgtagactttacattcgactagccttgcaaagaggcatttgagggattgaggaggaagctgactacctctcccatcatgctgccgccaaattgggagcttccctttgagctaaagtgtgatgcctctaattatgcacttggggctgtgttgtcccaaagagttggtaaactatcccatgtcattgcttatgctttagacaccttggatgcagcccaaattaactacaccaccactgagaaggacctttttactattgtttttgctttagataaatttagatcctacttgctttgctcccatatcactgtctttactgaccatgcagctttgaaatacctgttgaagaagcctgatgctaaaccctgattgatcaggtggatgcttcttcttcaggaatttgacattgagattaaggacagaagtggtgcagaaaacttggttgctgatcacttgagcaggattgagggacctcttgagtcctttcccattcgtgataattttcctgatgagcatttgatgcatttgcattcatcccatgtcacaccttggtttgctgacattgttaatttccttgttgcatctgttgttccacctaatgcatctaggtcccaaatagctaaacttaagagtgatgctaaatactatgtttgggatgatccttatttgtggaggtttggtagtgaccaagtgatccgaaggtgtgtgcctgaccaagaaattcagtctattcttcaattttgtcatggtacacctaccggaggtcattttggtcctcaaaggaccgctaggagggtatttgtaaggaccctcattcatggtaccaggattctttaacaagaaaacctgattttagacgcggcgcaggtcgcgccagggttggcgctgataatgccagactcactagctgtggcgccaggagcgccaagatggcgcgaaagcgccacacattcggccagttcacgctaatgacgtggttatggcgcgagtagcgtctttggcccgaaaggttggcgctgatagtgtcaagggtcgcatgggtctcaccagaagtgccctggaaacccaattttctctggttttccacgcggtcagcgccaaggttggcgcggatattgccacagattcgggaggttggcgctggaggcgcgggagttggcgctgatggcgccagagcaccgccattgtggcacggatcgcgccagagctcgggcaggttcagtataaaaggggcaaaacgcaaaattaaagagagactcagcctctttttcttccccacaaccccagcctccattagagagtatcccaagctttctaggaccttttggcttggctaaaacacctctcgatgatctttaatcttgagagaaacccttgaaagcttcaattcttcaattgctcccttgaaaaccccttgtgagtaagaattggattctcaaggaaaagctcagagaacttgagagtggcgaggacccacgacttgggaaggacaacagagcttgaggaagctgtcctgaagtctttctggtcgccactgaggtaagggactcaagtttctccgtttaatttcgattctaggggtttccatgaatagtgacctgatgtgttgcaaacacatcttatttttaatatagttttaagttatatttttgttaaaaaattagaaaaatagaataaaattagttaagactaatatttttattatcttaagctaattcaataccaatttggcaatttcaggctaagtagaggaaaaatcaagctaaagaaggaagacaacaaggactggagttccgcgctagtagcgcggtatccacgcgggtcgcgccatgtgcagggatgaagaacagttactggaagacaccacgcagctggcgtggaatacacgcagccagcgtggaaggacagtatgtatggcgccatcagcgccaaatccacgccactagcgtcaggaactcgaaagaaaagcaattttgtttctgccaggccacgcgggtcgcgccattttcatgcagccagcgccatactttctgtagtcccacgcgagtagcgcgaaacatcacgtcggtcgcgtggagtcgatttagtttccttatttaaaaagatctgttttatatttaggcttagcttttgggtttcttaccttaattatacgattctatatatattaggcctctgaacagagttaaaagaggaggaatacattagaatacattgagaaacatagctttagtcattgcaaaccctaagaatcaagattaaaggccaaagttctgcacaactatgaattcttcttatgctgtggtgttcttgaagcctatggctagctaatcatcttattgtgtgaaggtcatgaacttatgagtcatcctctgtaacttgactggtattgaatgcatatgttttgatttctttattcttatcttctcttttatttcatcttgtttagaattgaacactctagataagtactgagagttataattcgcaatgggaacgttggggttgtaatttctgacttgttaagaataacacttgttcttcacctaggaatagggatgcgtgagtgcggagcctataatatgatctttgattgcttaaattgattaatttcactaaggaattaggttatgaattcagtttaaaggtttaattcactaagaaattagggattagctaatataggaaagacttattctccaagtaatcataacacgaacccatatgatttattctctgtatgcttagtttgacagaatcgctaaaggtttagggttcttgatcgaattaaagggtgaaatcgctagttatctaggatttatgaatataggagagatatcttatatgtaaacttcaagttaacatgaccagttaagtgaaagaggtgatgtttataagggattgtacctgaccacaattcttcatccattggtaattcttcgaatcaatttactgcacattttcttacaattgttttttttttatcacacaaccaaccaaacaattcacaacactttctgcgtattttctgttttgatttcaatcatattgttaaccttactgtgaaattactccaatccctgtggagactataactctacttacctgaactttattacttgtaaacgatcggtgcacttgccgtaatcgcgcaacaagtttttggcgccgttgccggggattggtaacggatttcacagtaatcttaattttgtgattgaaactttttgttactaatcgcttctctaagtttttatgcgaagttcagttagctctgaggagttggaatttgacccagaaattgagagaacactccgaaggaggctagctaggcaaataaggagagaagctgaacaattcaactttgattcacttccagaatttgagtcggaagaagaaatggcggaagaacaacccaatccgccaagactgcgaccagaagatgaactaatggaggatattctggctcctatgttcacgagacccaattccagcattgtgcgaccacctatccaagctaatcactttgacataaatccttcattgatagcattggtggaacgcagtcagtttggaggggatgattcggaagacccacatgattttatagacagattccttagaatctgtgacaccattagacaccaaggagtctccgatgacgctgtaaggttgagtctatttccgtttgctgtaaaaggacatgctttgaggtggctgaactgtcagacatctaatagcattgcaacttgggaggatttagtctcaagatttttcgcagagtacttttccatggataagtataaccgtttggtgaatgaaatcaccaatttcacacaaaatggaagagagtctctttgcgctgcttggaaccgattccaagaattgatcaggagatgtccacagtatgatatgcctgtaggtaagcaggtaaggatatttttcaatggcatgactcctgagacacgtatgatagtgaatgttgcagctggaggaactataaggtccaagaccgccacacaaacatatgagctgatcaactctttggcccggaacgaaaatgaaagcatgacacattagccaaagagagaaccaattcaactttccactaatgatgcaatgcttgcggaacaaaagattttggcacatcaactagccaaattaaccgagaagatcgatagactgcaagtttctgcagcacaagtggcagttaatcaaccacgcacagtatgtgagtattgccaaggtgagcacgagtctaatacttgtcttattcttgttggtgctgaccctgtgcaggtaaacggtgtttggaacgatcaaagacagcagcaacaaccataccagcagcaaccatatcaaagaaacaacaattatgtagctggaaataactatcaaagaagatttcaaggatgtggtctggattacaaatccaataactatttgcaaccccctcctattccaaacaaagagccctctgagctggaaaaagtggtgatgcaattgtcgaaaaccacagcggaattcattgctgaaacaagagctcataggaccaatcaagatgcttccatcagaaacttggagaatcaaattggacagcttgcaaaacaaatggctgagagaccgcaaggtcaatttccaagtgatacaattgtgaatccaagagaacatgccaaggccattacaactagaagtggaaaagtattgactacgccggaagggcatgaagcaagcaagaagaaggaagctgagaaaaattctgcagcagtagaaaaggagaaggaaaaagctgtagaaaatgttgaagatccaaaatctgcacctcaagcaaagaagtgggacttttcttgctttgagaagcctccatatccggtgctaacaaagcaacaactgtagaaacaacaattttccaggttcttagaaatgttcaagaagttacatattaatataccatttgcagaggcattagctaatatgccaaattatgcaaagtttatgaaagaacttctttctaagaaacaaaaactgcaagaatgtgaaactatagcgctcacggaagagtgtagtgcgattatacaaaggaaacttcctcctaaattgaaggatcctggaagtttcaatatccctatagctataggtaatattaatgtaaggaaagctttatgtgatttaggggctagtattaatttgatgccattatctatgtgtaagtccctaggcataactgaactaaagcctactagagtatctttgcaattagcggataggtccataagaacaccttccggtgttattgaagatgttctagttaaggtagacaaattcatatttcctgctgactttattgtgttagatatggatggggaaagtgaaattcccctactcttaggaagatcttttctagccactgctagagccttgatagatgttgagcaaggaaaacttgaattaagattaaacgatgagtctgttgtatttaatgtttttgatgctatgaaacatccaactgatgaacatgattgttttcgattagatgtgttggataatgctatctgtgtaggaattacagcagaatcaaaagccatagacagtgtaaaattagaggaatttgttgctgtaactaactatgcagaaaaacatgcagcggaggacatgattgcagcagttgaaagggcagaaaactgtgctgcagaaaattctgcagcagagaaaaatgcagatgagaatattgcagaacctatgattgaagaactggaagtaaaggaagatgacatttcttccggtgctctggaagttgaactgaaagaactaccagaacaattgaagtacgtcttccttggtgaaaatgagacatatccagtcatcattaacaaagggctggaatggtttgaagaagaaaagctgatcaaagtactcaaggagcacaagtccgcaattggttggtctatttcagaccttaaaggtataaatccttccttttgtactcataagatcttaatggacactgacgttaaacctgtaaggcaaccccaaagaagattaaatcccacaatgaaagaggtagtaaggaaagaagtggttaagcttctagacgcaggtatgatatatccaatctcagacacaccatgggtaagtccagtccaagttgttcccaagaaaggaggaatgacagtagtacaaaatgaaaagaatgaattaatcccctcaagaacaatcacgggatggagaatgtgtgtagattatagaaggcttaacaatgcaacccgcaaagaccactttccacttccttttatggatcagatgcttgagagacttgccggtcaagattattattgttttattgacggatattctgggtataatcaaatcccagttgctccagaagatcaggaaaaaaccgctttcacttgtccatttggggtgttcgcttatagaagaatgccttttgggttatgtaatgcaccagctacttttcaaaggtgcatgcttgcaatcttttcagatatggtagaaaagagtcttgaggtatttatggatgatttttctgtctttggctcttgctttaattcatgtttaactaatttgaccaaagttttgaaaagatgtcaagaaactaacttggttttaaactgggaaaaatgtcattttatggttagggaaggcatagttttaggccacaaaatatctgaaatgggaatagaggttgatagggcaaagctgttgataattgaaaaattacctcctcctattaatgtgagtggtgttcgcagttttctaggacatgcaggtttttaccgaaggttcatcaaggatttctccaagattgcgaaaccactaagcaagttgttggaaaaagatactgattttgtatttgatgatgcttgtcttagtgcatttaagattctcaagcataaattaactactgcacctgttttaattgctccggattggggtttaccatttgaattaatgtgtgatgctagtgattatgccataggtgcagtattaggacaaagaaaagaaaagagattgcatgtaatttactatgccagtaaaattttaaatgaggcacaagtgaattatgcaacaacagaaaaagaaatgctagctgttgtctatgcacttgataagtttaggtcatatttggtagggtcaaaagttgtggtttatactgaccatgcagccttgaaattcctactgcacaaacaagatgcgaagccacgcttattgcggtggatgttgttgttacaagagtttgacctcgaaataagagacaaagctggagtagaaaacaaggttgcagaccatttgtctagaattcaagagaaaaatttacaagatggtccggaagtggaaatcaatgaatcatttcctgatgaacaaatcctagctgtacatactactccatggtttgctagtatggctaacttcaaggctgctggaattatgcctgaaacactcacttggcagcagagaaagaaatttctgcatgatgctaagaggtatctatgggacaacccttatctatattttcaatgtgctgacaatgtgattcgcaggtgcatatctgaaagcgaactgtcaaccattctatggcattgtcattcatccaattacggaggacactttggtgttaaccgaactgcacaaaaggtattacaatgtggctactattggccaacaatattcaaagactcaaaggactttgttatgcagtgtgacaattgccaaaggacaggtaatgtgtctagaaaagatgaaatgccactaaacaatatccaagaggtagaactttttgatgtgtggggcattgactttatgggaccattccctaagtcatttgctaatcaatatatcttggttgctgtggattacgtttccaagtgggttgaggtagttgcattacccacaaatgatgctaaagtagtcatctcattcttgagaaataacatattcacaaggtttggagtgccaagggctgtaattagtgatgggggaactcatttttgtaacaagaagctggatagcttgttgtctaaatatcgtgtcaagcataaagtagcaacaccataccacccacaaacaagtggccaagtagagatttccaacagagagctgaagcggatacttgagaaaacagttggaacttcaagaaaagattggtctaagaagttagatgatgcactgtgggcatatcggactgcattcaagacacctataggtatgtctccctttcaacttgtatatggtaaggcttgtcatttacctattgaacttgagcataaagcactttgggcaaccaagtttttaaattttgaactaaccaaagctaatgagaaaaggttgcttcaaatgaatgagttagatgagtttagattagctgcttatgagaatgctcgaatctacaaagaaaaaacaaagaagtggcatgacaaccaaattcgaaccaaggagtttatgcctggccaacaagttctgttatacaactctcgcctgagactctttccaggtaagttaaagtcaaggtggtctggaccattcctggttcgtgaagtttttccttatggtacagtggcaatctcagccttgaacaatgataaagcatttaaggtaaatggttataggctgaaacattattttggaggggaagtggacagagattcaagttctgtaccactcaaggccaatgaggtttgaaccacagtaaatgtctagcttaagacgttaaacgagcaccatgttctgtatatatatatatatatatatatatatatatatatatatttgctattttaagttcaattaactaatagtaaaaattggtagctataagtttaaatttctgcaattatacttgcaaagtcatgcattattatttaagctttgttgcaatttaaataagtaagataatttagtatttgttttatatatttcatgtaggttagcacagtaatttagttattaagttaattaggagcaacaagcagaaaagaagaaaagctgtaagggaatacgacgcgaatcgcgccgctctacgctctaatcgcgccaaagacactgccttcccacgctggccgcgcaaaacccacgccatccgcgtgggatgctcgaaaactaacctacatctgcataatttcgcgccagtagcgtaaccacggcgcaaactgcgccaaagggcagtccccaattgtcaactttcacgtgactagcgtggcaatggcgctagtcgcgtcgattctaaagattcatgaatccttccagggcaattcacgcgatttgcgtgactatagcgcaactcgcgcgggggaacagaaagaaattgaagctgaagcgtctaactcacgctagtggcgtggaaccagcgctagtcgcgcgacagagtagaaacacaatagtcattcactggcatatggcgcgacctgcgtcgtattcgcgcgactcgcgcgagatcgtgggaaccgtttttaaattaaaacacttcattcgcgcccctcacttccactctcccaaatcagttcccccaatttcgcccaaaccccaaccatcaccattaacctccttaacccaattaactccctcataaacccaatccctctttaaaagcttaaaatcattcttcttctccaccgtatcatctttcattctctcattttcgaacccctttgtgtcctttcctctgcatttgtatttgcatcaagtagaactaagctttgaaattgaacaatggcaagagacaaggtatgtctctaaaacttaaattgttttgtgtaatgacatccataggcaccaccagttcctgcagccactgatccacttgacatttctgaggctgttggtaccactgttacccagccattgatcattgagcatacagaggttgatgctactgctgcagaggaccgagatggagcatagagacctcaggacttattttattttattctgttttatgtttctttttatttttattttccagttttagatttaattatggattttagttggatttagcttttgcacatttacatcatacattgattttgcacattacattacattttcacacagtatgcattatatatagtacagttattcgatttttcttgtgcataaataatcattagacaaatgttgagttgaatgcgatttccaaataatgcttcaaattttcaaaagcaccatgaccttgtttgtggttgctggggacagcaacatataaatctgggaatggtcgttacgcattatttcgaaaatcacaatcaaagaaacaaatgaagtctaatggactttttcaaaatttttctaaaataagcagcacacaaatttttcagattaagaaagcgaatgaacttaaggatggacagatttctctggattaagcttgatgaaataagatacatggactacataatgcatgagtagagtttgattgatggtatgtgaaactcatgttgaatgttgaaatgatgccagatatgcagttgattgagaatgacttgagttacaacacctgtaaggtttgcgccaaacactgtaaattttcttccgagagactccatacttcatggtgttctagaacttgaattgtttctctgaatgcaggtgtgacttgaaatgattaaggcacaatttttctataaaaccagggccaaattgacttaccataaataattttttttttctttgaacctgaattttgagcctaagcctttcatttcaataaacccaatcaagccatatctatatgactaaacccttttgaggctagagaaggtgagataagtctatgacagcaaggtgttagttaccaaggaatgaaggaaaataagagaaatcaaatgaatgagaagaagattcatgaatacatcagctagaaaaatttgagaagttgcagtatctattatgttttaattgcaaatatgtgttaagaaaatctgaaaattcaaaaagaaagttagtattttactattttacgttcagaataaaaggttgaataaaagtaccagttagaaaaagagaggacaaagagtttggaagaccacacaaagttagacttaaggaactgaaactagcctctgatggagctacttttcccaaatgattcatacccttagcccagccacgttacatgtaatgcctggcaatcttaagcatgtaattaagcctggattaagcccatgattaagggtaatgagtaggcttaagagtattcagtgacaggcttcacagaggtttgagaaaaggtgaagaaaacagtttcgaacatctcacgctaacagcgtgagattccacgctaacagcgtggactggccgagtccacggcgctatcagcgtgagatgccgcgctaacagcgtgaagtgatcgagcctatggcgctatcagcgtgaaatgcggcgctatcagcgtgggatcggcggaaatgttttataaacagcccatagggctgagaaagaaaaggaagaaaagagagagggaagagagaaacggccattgatggccaagagagcttcatatcttctccatatctcatctaaacacctccgacccaactggaaaagtgttcagaaccccgagaggagtgaaaacccccgattgattcctgagaaaagctgagaaatggtgagatcagatttctcagagagaaccccggagagcttgagacccagaggcaaaggaggctcagatcgggcgagtggtctgagggaaagtgatttccaggtgcttctgagcaccgcagaggtaagaaactcgagctctaactgttggttctatgttttagatttcggggttttggggttaccttaagggatgtttttggaggtgttagagccgtcattaggctcggactctgtagagtcttatgctcagaggactgttctgaagagtgtagagccttgaatcatcattattgatgaagtttgattttggctctgagacagtctgagcagagataaaaggtcgactatttgactagtctggaccttagagcagttgagaaagttgctcaggagatgatatagaagagtttgaccggttgaaaactggtgattatgagaagttgggtttaggctattatgagcagaaggatgctctatgttagcctgatcagagtcttgtggaggctctgtaaccctgtataggctgagagttatgttatgggaaggactgaggttcctttctcagagacagttgaggctgtctgatgagcttattatgttatctatggatggtctgtaatatatgtatgtttgccttgttagggcttgacacaaggtgtcagaggagcagaccattgtccagaggtgggaagtgcaggctcagcttgccaggtaagctcatcgctctgggggattagcccttttctcttgtttatcacccaagtgaggtgaatctgcatgctatgtttgttaaggaatatgtatgtgtgaaggtgcatgctaaggtaagaaaggccattgtggcctggttagaatagaacatgtgattaatggcctgagtggcctatttcaatgattaggtatgttatgagccttaaaagctagatgaacggcacttggagtgatactcaagctgtgccgtcatgtatgatgaaccctaggacaaataccaagagggatgaacactgtaatgtgttccaggacttgatgtggtgcagatccgagtaagatctgtgatggaatctataagataccgcgatggtatcaggctagccgaggttccctagccagaggaagagtttgaggactccctggaatagctgagattccacgggaggtgccactactctccgcttaaagtcctaagcgtggattatccttacaaatgttcctccttaggcataaatgatgatatgggtgaagaccatagtggtggtctataattggttattctctgattaggagaatagagtcctattatagtaggaccgatattatgtgatggatgagatctctgagaaagggagattgatatgtatgtacatgctgattacgagcatactatgattaactgatgatatatgatctaagccctatgaaagggtgtataatgtctaataagtatatgaatgtacgtttaaggttatatatgtcaggaatggaatagaataaagaaagactttgggttcaagtcccaaagcaagagatgaagactttgggttcaagtcccaaagcaataaagaaagactttgggttcaagtcccaaagcaagagattaagactttgggttcaagtcccgaagcaacctattgtcatgacaactgtaagtccttggcagaggaaccaaggcaacataagacgggtgtagtgtaagactctgggttcaagttccagagcatcgaatccccaaagaggaaagttaatggatagaaagttatggatgattagaatgtaagaccttggcagaggaaccgaggccatatgaaatgggtgcgaagtaagaatacgggttcaagtcccgaagcatcaaatcacccaagaggaaggtttaattgattatgtcggctataagccgtatgtatatcacctaaggaattacaggtgaatgagttttaatgatatgtgatagaacagggacttgagatccctgaatgtttgactgatgatgaagtcctggactaaagttccaggcagcatatgtagataggttcaggataagtaataaggaaaaacaggttatagggaggaaatacctctctagtatgagtagtgttcagttatgaacacttatatgttatagtacctctgtgagacgaactctgaaagtagatatgtaagacgctgaagccatggttatggcttaaagctatgtaagatgtatgaaagagccggtatagtatatggatgccatagtaatggcgtggctctatgagatgagttgagatggcttgagagccagtatgaggggttagacctctgataatgatggattcagttaagtacccagagaactggggaatatgttacagctaggataaggtcctagattgtgtatgtatgtgagctgggatcatatcctaagctctgatgtatgtatgtgtatgcttggggtaaaccagggaaagggaggatatcccagatccctgagcttactgagatgtttatctcacccctttgtgggctgtggttttcagggacttccggagaggagaagcaaccacagagctcgaggctgagtgagtatgctggagatggtcatgggctgcagatgcagattagaagagttttgattttatacctctgtcttggatttgtataggtaaagggtatgagcatacccgttgtatgtaatgtttatgtttcctcctaattatctaagtatagtggtttatgtatctgcctatgtttttgtatgttgggtatctggatcagcaggggcttatgttgatgttttatgttgtgttttgtatctcatgcataatgatatcgagaaaaacgattctatcgcttccggactgcgttcagttaacgctgataacgctcttatgatacgtttaagggtaacacatcgggtgcacacggggtgttacggtaatgtccctgattagaaattgggggcgttacattacaagccttaaagaccttttgttcaagtcatgcttacaattattgagaatatcttcaagcctatggttatgctgtgattatgttgagtaagaggataattataacctcatacacttgagtgaatgagtgattaaacacatatctgtgaggatactcaagtattttcttatggtgacagcattgaaagtatcatagaggctttgactgaattgatcatacacttcatgattattctaggattgtaacttgtggtttgtgtttgattgttaattcttgcttaagtcttagaattctttctgttgctgaggacagcaactttcaaatctgggaattgtttgatgtgttgcaaacacatcttatttttaatatagttttaagttatatttttgttaaaaaattaggaaaatagaataaaattagttaagtctaatatttttattatcttaagctaattcaataccaatttggcaatttcaggctaagtagaggaaaaatcaagctaaagaaggaagacaacaaggactggagttccgcgctagtagcgcggtatccacgcgggtcgcgccatgtgcagggatgaagaacagttactggaagacaccacgcagctggcgtggaatacacgcagccagcgtggaaggacagtatgtatggcgccatcagcgccaaatccacgccattagcgtcaggaactcgaaagaaaagcaattttgtttctgccaggccacgcgggtcgcgccgttttcatgcagccagcgccatactttttgtagtcccgcgcgagtagcgcgaaacatcacgccggttgcgtggagtcgatttagtttccttatttaaaaagatctgttttatatttaggcttagcttttgggtttcttaccttaattatacgattctatatatatattaggcctctgaacagagttaaaagaggaggaatacattagaatacattgagaaacatagctttagtcattgcaaaccctaggaatcaagattaaaggccaaagttctgcacaactatgaattcttcttatgctgtggtgttcttgaagcctatggctagctaatcatcttattgtgtgaaggtcatgaacttatgagtcatcctctgtaacttgactggtattgaatgcatatgttttgatttctttattcttatcttctcttttatttcatcttgtttagaattgatcactctagataagtactgagagttataattcgcaatgggaacgttggggttgtaatttctgacttgttaagaataacacttgttcttcacctaggaatagggatgcgtgagtgcggagcctataatatgatctttgattgcttaaattgattaatttcactaaggaattaggttatgaattcagtttaaaggtttaattcactaagaaattagggattagctaatataggaaagacttattctccgagtaatcataacacgaacccatatgatttattctctgtatgcttagtttgacagaatcgctaaaggtttagggttcttgatcaaattaaagggtgaaatcgctagttatctaggatttacgaatataggagagatatcttatatgtaaacttcaagttaacatgaccagttaagtgaaagaggtgatgtttataagggattgtacctgaccacaattcttcatccattggtaattcttcgaatcaatttactgcacattttcttacaattgtttttttttttatcacacaaccaaccaaacaattcacaacactttctgcgtattttctgttttgatttcaatcatattgttaaccttactgtgaaattactccaatccctgtggagacgataactttactttcctgaactttattacttgtaaacgatcggtgcacttgccgtaatcgcgcaacatgacccacttgagctggggctagaattagcccaaggtcctatagagaaacttgtttagagcaatgtatagatgaaggattagctttcagtttctaatttagatgactttgaatcttggatctgtggttgcctgtgtgacttgtgtagagtcatttgtggatggttctctgatatgctagagccttgattatgatggtatgagcctaagaggctagttgaacggtgcctgtgttgaggattagaccgttccaaagatatattgagttataaggctgaggaaaacttatgctcagatatgtgttttgcattgagtctaggatgactcagatgctggttttcagccttagtggaccttgtatggtttgtgagagaagcttagtgatggcttgacttgattgaaccctaggttaggggaattctgatatgttatgatctgtgattgaatgcctttttggcttgattttgatatgagactgcatatgccttgattagggcttaattgtgagactattggtggcaggagccacagagcagggacagtaccgcagattgagaccttgctaggtaagttcagtgtccctggggatgatttcccatcttgtgtgccacaccacactccgggggagtggtggtcatttcatgatgcatgcattggtagttgcatcctcataatgatatatgtatgcatctgtgcttgatttgtgatgtgatatgactgtgatagatctattggccaatagatagatatggacctccctaggagatggtggtttcctcctagtatggttggctcatggttgaggtagctcccagggaattgattcccatagaccatggggatagaagttgaggtagctccttctattctcggaggtaccatatatgtgcatccatgcgaagggctagcacccaatgggatggcacaggtgttttcggactcccactgatacaggcgttgaggtagctccgccaggcgttgaggcagctctgatatgtttgtatgatgtgcttatattgttatgagggccagaggaccaggccagtgggccatttgcttatgatacctgatgtatgtgttatggaagtgggccagggtggaggagattcctccatggaccctgagcttactgaaatgtgtatctcaccccgtgtggggatttatgatttcaggtgactcttttggacgaagagagcagtctcagggcaggaggcccgagtagagatgtttttgcttgactgggaagcagcagatagagcttgaaggctcagatttgttttgattatattttgtacccttgataagggatggtgtgtgtacacctgatacatgtatagttctgtataccctcggtgagggcaaatattcttttgtatcaccatgatgtggtgtgaactgtgatgtatatgtttgtacagaactatttatgatatgtatatgagacttgcctcctgagtataaatgttgtatatttgataatctgcctaagtcttttagttatctgtctttatggtatatgttatgagaaactggatcagcaggggtgtgaaaaaatgtatcttgtatgtatgttgtttgttatatgttttattccatacataatgaatcaagaaaaatgattgtatgcttccgctatgttttaaaagtgatgttttaagtgctaatctgatattattaatgataacgcaccggaggcctacggagtgttacagtattagactgtggattgttttggcccaccttgtttagagatgctcatcactttaccaccacttgtgagcagtgtcagagagcaagaggcacaattacacatagacatgagatgcctcagcaacccattattttctatgagatttttgatgtctggggtattgattttatgggtccatttcctgtttctcatggcttttcatatattttgcttgctgttgattatgtttctagatgggttgaggctaaggccactagaactaatgattctaaagttgttgtggattttgtgagatccaacattttttgcaggtttggtgtgcctaaagccattatcagtgaccaggggagccatttctgtaaccgatcattcgcatccttgcttcagaagtatgggattgtgcatagagttgctacagcttatgttgtgcaatttatgcgaatacggcaagtgcaccgatcgttaacaagtaataaaagtaggtaagtagagttatcgtctccacagggattggaatgatttttacaataatattaattctaaatgattggaatttaaaaacagaaaaataaagaacaaagaagtaattgttgagttgtggttggtgtttgaataaaaacagaaattaaagtaagtaaaaagataaagaagttaccaatggaagaaacaattgtggtcaggcgcaatcccctttgttcctacctccttcacttgattggtttattatcttaagtcacacacttgataaatctttcctaaattcgtaaatcctagactcttaagagcattaaccagcgatttcaccctttagttcgatcgagaaacctaaacccttagtgaatctgtcaaactaagtattcaaagaatatatctcatgtgatcttgttaagattattcggataataagcctttcctaagttagttaatccataatgtcttagtgaatcaaccctttatcctgaatcgaaaacccaatgtcttggtgaaatctatcaaattaagcatacaaagaacatattataaaatccgtagccacgcatccctatgtctaggcgaagaacgactattattctaaacaggtcagaaattagaaccccaacgtgtccattgcgaattctaaccctcaatacttaaatagaatggccaattccaaataagaataaaacattaaatagcacagagtagaataaaataatcaaaacagcattagaatcaataccaattcatgttacagaggagttacatcagttaatggccttcccacaatacaagttcagcctgccataggcttcaagaaaccaaaagctatcaaatagaacattcttgagtgaccttgccttgattcttgacttccaatggtgaaaataggagaaggagagagtagaaaggataatagaaggtgatggtggatggtaagagatgtctagaactccccccagaggcctttatttatagatagatctaattaaggtaacaaggcctattttctgttccaaatctaaatcaaatcttcttaattaaggaatctaaatatatttatagaatcacttaattaaggcaactaatcctaatataatatcaaatctgaaaatatataatttaaataaggaaacagcatcaacctcacgcgacccgcgcgcgataccacgcgagtcgcgtggactggcaaaatagaatggcgcgtatcgcgtggaatgtgaagtgcttcgcgtggattggcagaactgaaatggcttaaacctggagattcccacgcgacatacgtgagtgatggcgcgacccgcgtgagttggcagagaagatttcattaatcctttgaattctgacgcgacccgcgtggatttgacgcgtcatacgtgatcttctctggtcttccaagtgactcgcgtggatagtggcgcgactcgcgcgagactccagtacttgttttcttctttctttggcctttattctcctcttttgtcctgaaaatgcatgattggtattggaatgagataaaataaaatattattaataaactaactaaaactaatctaattcctaattatttaatcaaaatataacctaaaaactatcctaaactaagatgtgtttgcaacacatcaaacaattcccagatttattagttgctgtcctcagcaacagacagaattctaagataaacacaaggatcaacaatcaaactgaaccacaatttacaatcctagaattatcatgctgagtataatcaatttatatcaaagcttctatggtactctaaaattcatcaatgaatgagatgacttgagtattcctcacagaaatgtgtgtatgcactcatgcactcaagtgtatcaagtttgtaataatctcactcaacaaaatcaaagcactaccataggcttgaaaatattctcaacagatgcaagcataattagatcaaaaggtcttttgggcttgtaacttggctgggttaaaggtaggaaaaatttttggataagtagctagtatgaggctagatccagtcctttaagtccaatcctgtggtctttcattttccttgttcatcttcttcacaatctggtactttattcaacatttataataactaaaacaaaacaaacaataaactttctttttgatttttcttttctttttactatacagcaactttcaaatttttcagcttataatttcaggcataatatttctcaactggcctgctgcttatttcttctttttctttcctaccaattgaattcactttgttttccttgatgccttgatgaacacttccctgttttctgttgtcatgaacttaaattaccttctctagcctcagggaggttgattaatggacatggctctgattttggtagcagaattgaaaggctaaagctcaaaattaggtgcaaatggaataatgattgaaggtaagtcaatttggccctcgttttaataagaagaaagtgccttaatcatgtcaatttatacctgcatccagagaaacaattcaagttctagagtactaagaaaatggagtctctcaagaagaaaaataattactgtttggcttaaaagtctcacaggtatttcactcaagtcaaacactattgacttcatttcaaacaacatttcaacttcaacatgcatatcatataccaacaatcaaaatccaatcatgtatcatgtaattcatgctatatttcatctcacacaagcttttatcagagaattcctatccattactgtgttcattcacttttaagtctgaaaatttttgatgtgctgcaacttttattgaaataattaactaagaatttaaaataatgactaaaacaattaaaacacaaattttctgttgggcatcctttgtgatttaacaaataatgcatatacaaccattcccagatttagaaaattgctgtcctcagcaacaagtgaagaggattaaaacattcaaatcatgtatgcattatttgataaactcaactagcactgagtattagtccaaacagaacttatttaaaactgctaactaacaaaacagttaaactaaaagcatactgaaaattaaaattaaaacagtaaaacaaataagaggttccagtgttgttcttttgctgcagtatgtaacaataattccttactctcttcatcttacagtgcagaaaaattccaatttatacctggtgcagtgggtgaattcccagatttattccattatttgtagctcaaaataaccaccaaatcatgaaactgtgcattagtgaataataatcaaacaaatactagcacagttgttaaaaacaacaattatgtatgtatgtggttgggaatttaaactgctcagaatttcgcagtgctcacaattcccagatttatttcattccataatttcacacaatcagctgtttgttattggggttacaaattgtaatggtaataatcagtttataaacaacaccaaataggtctcagacacctgtaataaaaaatataagccaagctacaattatttagaaaacaatttagcatttagcaaggcttaccaatgtggattcccagatttaaatccttgcatattacaaataaaatcagcactaagaaccacacaaaaatcctaacaacaattcccagatttaagtccttgcatgtatcaaaatttacagaattcaattatttcatgcaagtctacccccatttgattcaatacttaagcacatataaaagatgaatttccctattcccagatttaggcttttagcatgtttaaggcatttgattcaaaacattagtaattcaggccttaataatatttcattattactcaattcctgctttaccatagtcattctcatcatgtcatactaattcattaaagctttatgcatattgaaccaactttggcatcatttcaagctaaatttttcatctagacatttcatcaaacaggtaatgtgcatgaaaacaaatcaacataatgtgtgtatttggagtatgtttaaacccaaaaatttttttttttcaatccgttcagaccacagacaagaaagagtagaatgagataatcatttatatcaaaatcgaaaatgtggctaccttaaggtgttccagagtaaagacttaccttgtccttggccattgctcaattggagtagatgaatgtagagaattaggatgattatgaatgcaagagtgcacggaagaagggacaatgtggggtttttatagattgagtgaggttgagggagtttctggtggttaatggggtttgagggagttagggcgaggagtctggagagagtttgggagattggaagtgaagagggcgtgattttggttctcatttaaaaacggtttccgcgcattcacgcgactcgcgccgtatatgaagtgtgtcgcgccatgctccagtaaagaattggctgttccaagtgagtcgcgcggatttcacacgactcgcgtgagttgattctggctcttcacgcgagtcacttcatgttccacgcacgtcgcgtggattggcatggtttgtctgttgaatttctacatgtgacgcgagtcgcgtcatttaccacgtgggtcgcgtgaagggacagtatgtatggcgcgatgtgcatggagttccacgcaagtcgcgtgacttgccttttctgattacctttagttttcctcctgctctttaattttctaacctaataactatgattacttaattactaataattgaaatgactaaactaatacttactacctatttaagcaaaattggaatgaacttaaaattggttatgatgcatgaacttagaattgcatgaataaattgcatgaattgaaatctactactatcaattgaatttaagcttatatacggaattcagtgctttgtttaatgtctttaagctagacgcatcatgctttttaattattagtggaattaagtggattaagagttttaacactatccacttggttttcaacgtgaggtttcagtcgacatttaggaactttaaaaggtttgcctttgtcaaagggaatgatttctatgaatccaaataagcaaatcttttgaatgatgaaaggaccagaccaacaaaatgctttcttacctggaaatatcatgcgatatgttgctagcattaccttttgtcctggctcaattctcttgttacgccacttcttgattttctgtgcttccaactttttggcacttttctttttagccctttccacagcttttgttgcaacctttttcagttttacctttggtgcttcgtctgaaaattcagttttgttttccagcccaggttcaagagtttctacagtgtttggttgacttgtaatgttcaatttttcagcaattgtcactgctacagcttccgcttttgcataattttcttctgcagatttttctgctgcattattacttgttgtatcggatgctgctggtatatgtgctgctgtcaaattttctgcaacaagttctacatgtgttgagttttcttctgcagtattttccactgcagtttctgcacctactgctgttagacttgaacaattcatgttatccaacaaatcaagcctagaacaagtataactattagatggattagtcacaggattaaaaacattaaaaatcacagattcatcttccatcctcaattctaatttaccttgttctacatcaatcaaggctctagaagttgctaaaaatgatcttcctaaaattagagggatttcactttcaccttccatatctaaaaccacaaaatctgcagggaagatgaatttgtctacttttactaatacatcctcaattattcctgatggtttccttaatgatctatccgctaattgcaaggaaactccagtggattttaattcagttatacctagggacttacacatggataatggcattaaatttatactagcccctaagtcacaaagtgcccttcctatattcatatttcctattgacataggaatattaaagcttccagggtctttcaatttctttggaagttttcttaaaatgatggcactacactcctcggtgagttttatggttcctccttttactagcttctctttcttagacagaatttctttcatgaattttgcataatgaggcatcttagccaatgcctcagcaaatggaatattaacatgtaactttttaaacatgtctaagaacctggcaaactgctgttgttggatttgctgtttggttagcaccggatatgggggtttctcaaagcgagagaagtcccattgcttctttggttgatgtgcagaattttgttccccagaattttctgcagctttttcttcatttgtatcagctgctgcagatttttcaagttccttgttgcttgcctcatgctttatgggttcagttagtacttttcctctcctagtggtgacagcattgacatgttcctttgggtttgtctctgtggtacttgggaactgtccttgtggcctttctgcaacttgctttgccaattgaccaatttgaatttcaagattccggatggaggcatcttggtttctgtggtgggctctagtctcttggatgaattcagatgttgtttgtgccagctgcattactactttctcaagttcagaaatgctggtggtgggaataggagggggctgtagataattattagacttgtagtctaatcctcctccttgcagattcctttgataattgtttccagcagtataattatagtttttctgctgtggttgctgctgtctttgatcattccaaatgccattaacctgcacagggtcagctccaacaagaataggacaaacattagaataatgctcaccttggcagtattcacaactgacttgtggtttactggctgaaacttgggctgcagagacttgcattctatctatcttttcatttaatttagccaattgttgggctaaaattttttgttctgcaagcatggcatcactgctgtccaattgtattggttctctctttggctgaatggtgttgcttacgttttcagtgcaagccaaagatttaattagctcataagtttgagctgctgtctttgatctaattgtgcctcccgctgcaacattaacaatcattcgagtttcaggagttataccattaaagaatatccttacctgcttacctacaggcatatcatattgtggacatctccttatcaactcttgaaatctattccatgcagcgtataaggactctcttccgttttgtgtgaagttggtgatttcattcaccaagcggttgtatttttccatggaaaaatattctgtgaagaaccttgtaactagatcttcccatgttgagatgctatttggtgtttgacagtttaaccatctcaatgcatttcccttgacagcaaagggaaataaactcaatcttaccgcatcgtcggagactccttgatgtctaatggtattacagattctaagaaatctgtctataaaatcatgtgggtcttccgaatcttctcctccaaattgactgcgttccaccaaaactattaatgaaggattaatgtcaaaatgattagcttgaattggtggcctcacaatactggagttaggccttgtgaacataggagccagaatatcctccataagttcatcctcaggtcttgtccttggtgggggccgatgatttctttcttcttcagccatctctatttctgattccaactctaattcgggaatcgaatcaaagtcaaaattctcagcttctcttcttcttctttgtatggctagtcttcttcggatggttctttctatttcgggatcgaactgcaagtccttagaattgactaaacctcgcataaaacttggagaagcgattagtaacaaaaattccaatcacaaaaattaaaaattactgtaaaaatccgttaaccaatccccggcaacggcgccaaaaacttgttgcgcgattaacgcgattgatacggcaagtgcaccgatcgttaacaagtaataaaagtaggtaagtagagttatcgtctccacagggattggaatgatttttacaataatattaattctaaatgattggaatttaaaaacagaaaaataaagaacaaagaagtaattgttgagttgtggttggtgtttgaataaaaacagaaattaaagtaagtaaaaagataaagaagttaccaatggaagaaacaattgtggtcaggcgcaatcccctttgttcctacctccttcacttgattgttttattatcttaagtcacacacttgataaatctttcctaaattcgtaaatcctagactcttaagagcattaaccagcgatttcaccctttagttcgatcgagaaacctaaacccttagtgaatctgtcaaactaagtattcaaagaatatatctcatgtgatcttgttaagattattcggataataagcctttcctaagttagttaatccataatgtcttagtgaatcaaccctttaacctgaatcgaaaacccaatgtcttggtgaaatctatcaaattaagcatacaaagaacatattataaaatccgtagccacgtatccctatgtctaggcgaagaacgactattattctaaacaggtcagaaattagaaccccaacgtgtccattgcgaattctaaccctcaatacttaaatagaatggccaattccaaataagaataaaacattaaatagcacagagtagaataaaataatcaaaacagcattagaatcaataccaattcaagttacagaggagttacatcagttcatggccttcccacaatacaagttcagcctgccataggcttcaagaaaccaaaagctatcaaatagaacattcttgagtgaccttgccttgattcttgacttccaatggtgaaaataggagaaggagagagtagaaaggataatagaaggtgatggtggatggtaagagatgtctagaactccccccagaggcctttatttatagatagatctaattaaggtaacaaggcctattttctgttccaaatctaaatcaaatcttcttaattaaggaatctaaatatatttatagaatcacttaattaaggcaactaatcctaatataatatcaaatctgaaaatatataatttaaataaggaaacagcatcaacctcacgcgacccgcgcgcgataccacgcgagtcgcgtggactggcaaaatagaatggcgcgtatcgcgtggaatgtgaagtgcttcgcgtggattggcagaactgaaatggcttaaacctggagattcccacgcgacatacgtgagtgatggcacgacccgcgtgagttggcagagaagatttcattaatcctttgagttctgacgcgacccgcgtggatttgacgcgtcatgcgtgatcttctctggtcttccaagtgactcgcgtggatagtggcgcgactcgcgcgagactccagtacttgttttcttctttctttggcctttattctcctcttttgtcctgaaaatgcatgattggtattggaatgagataaaataaaatattattaataaactaactaaaactaatctaattcctaattatttaatcaaaatataacctaaaaactatcctaaactaagatgtgtttgcaacacatcagcttatcatcccaaactaatgggcaagcagaggtttttaacagagagatcaagcaagtgttacagaaggtggtgcaacccaacagaaaagattggagcaagcttcttgaggatactaatgggcaagcagaggtttttaatagaaagatcaagcaagtgttacagaaggtggtgtaacccaacaggaaagattggagcaagcttttgaggatgctttatgggctcataggaccgcttaccgcacacctttggggatgtctccctatagggtggttttcggtaaggcatgccacctttcagtggagattgagcatcgtgcttattgggcggtaaagagttgtaacatggcatttgatgaagcgggtatacaaaggaagcttcagttgcaagagcttgaggagattcgtttggaagcctatgagaactccaagatttacaaggagaaaatgaagaaattccatgactctaggattcttagaaaggagttccatagtggccaaaaagtgttattgtttaattcttgccttaagcttatttccggtaaactacgatttagatgggatggaccttttgttattactaatgtttttccccatggtgcagttgagattaaaaatgaagctaccggcaaagtcttcaaagtcattggtcaccaactcaaagcatttcatgagagcccacaagtggaggaagagcttgtggaggacatctctttggtcctgccaattttgtatgaagatgtgtcttgaatgacatttggggagtttccttttcccttcttttatttgttgtctctttgttgcatttatttgcatgcttacattgaggacaatgtgcatttaagtggggggtgaaggatccttaaaatttttgaaattctggttgttttctgttttctgcctgtttatgttttgttacgatctgtttgtcagtgtctgttgttttctgttttctgtttatctgtctgtatatattttgtttgtctgttttagtttttgagtctgtatgtttttgttgtttgtttctgttgtttctgtttgttgctgtttgttgcaatttttattgaatttaggcactttttcatgtttttcataggatttctaatttgcataaattgtgagaaatgttaaaaagttggttgatttgagaggtttcatacttgatgtgaatcattgttgcaattgttgaagtgatgagtaggcttgagaaatagagtttaagatgaaccatgtgtggtagaattatgccttgtgagtttttgagccttgtggatatgttctttcatgtgtgatttcacccttgtgctagattactctatgttttgccttgcctcttttgacattccttgttgcacatgctttgattgaaatgatttaggccttctttcttttagccactagccaaataagcctatccttgtgttgatatccattgtcaccctctttgagcctttagccttttctttcttgtttagctcattaaaaactaaaaaaaaatgatggaaaaccatgttaccctagctttaaggagaaaaaggggctttggaattgttttggaagtgggtttcaaacaagtgtggggtgtttgtcttttgttttgttttgaaagaaaagaaaagaaaaagagaaaagaaagagttcaaatagcaaaagttcaaagaaaagaagaaaaagaagaaaagtaaaaaaaaaattgtgtataagcaaagaaaaagaagttcaagcaaagaaaaaaaatatatgcaataaaagttgttatagttcattttcatccttgtaaattcttttaaatttcaccttgcttctacccttcttttatcttgttggcttgctccctattgtccctcttttcttttaagctttagcctaaatatccttttcttatccacctttccctaagccattcattacaagctaataaagtccttttgatcttttgatgcatctgtatttcaagttgaatgaatgagaggtttgtcaatgcttggatgtgctagttgcatgtggtgtttgagtgtaaatacaagccatacacatcatgtgaggttgagtgccaccctttgagagaattctatcaccttggtgcattcttgattctaaacttgactactttttcactttgcactttgtgatcatgttttcatggattgtttgttacctcaacattattcttccatctttccatctctcacttttgtgcattgttatgatccattgaaaaatatgtgtgcctagttcataccctttctttaaatttttggtttactttggtttgaatttttctcttagtctttcttttagttttgcccaggagtgcaaagtttaagtgtggggtattttgatagagtgcttttagtttagtatttttctatccttcttagcttatttgacctcttttggagctttattttcctattctaattcagtttttggcctaggcaagtaagtgggcttaattgctaattgttgcgtatttttggattttttctcacttgacgtatctgacttgtgcaggacctatagggtgctaccgatctctgaatggagcgttctaggagtctctggaaatataacgaaaagatctacaaattttctagaaatagcttgaggccaattctgtcatttagagggttattttaagctttgaagttagcgcctctgcacttgtaattttgggctgcaaatttgactttcatggttgtaaatagcaaataattagattgttgggtttatttgtggcccattttattttcagaactcagtcactacatatattagtgactttagtgaaacttggagcacacttttcattttaataaaaagcagttttgcatttacttttcttaagtttttaggatcaaaacccttactctcattttctctctattgttcttccttgttcttcattttcgttttgccgtgcttccattttcgtgcaaccatttcatggggctttcactgatgatgatcatggaaggctaaatcttcaatcaatccaaaaatccaacccaagcacaaggagaatttgagttctggtttagtatttcgaattctatttgaatgttcatcttcttcttcaattgctattatgttttcatgattatgaatgcgtttaggattgaaaacggattaggttatggattcatttcctaattttgaatattaatcacagattaattggatgatatttcagttagggttgtggtttcaatcaatttaggggttaagtcgattgagttgcttctaatgagattgaatgaactttcatgataggattaatttctgagaacaatgatgattcaaattacttggtgaggtgaattggattgatgttttaaattctgttttacattacttcttttgaattctgttagtttctgtgttgctctttaattttagtttacgtttttgcaagttttacttacgcacacaaactgtttgataaaattccccccttactgttattcgtaaattgaagctagaatcatattgattgtgtctctgagtcgacctaggttagctctgtgctacagaattaacgtagttaaattgttttggtgcgtatcgacaacgtgatatcacttggcggctccaataaaaagaagatctctctgcaaggtcacctactgctgctcatctgctcccacgaactaaagtttgtgatcatcacaagtaccaaccacacggtacaacaaatgcaagggtgagtttattatataaaatcaacaaacatcagatagcagaaattgggaaggaaacaattttacccatcacaatcattaacaaaaatccatgattccaatacacactcaacaaaccaatcatccaatgcatttcacaactcaaacaatcatgcatagaatgatgcatgcacctgactcatctatcagcatgcaatgtggtaccatctccaaagaaataacctctcataggaaaaatgattcaccacctatcagggccaccctgtcgtgcactggccattcccccacctggtgatcagccagcgtcgcaagggaattccaaacctaatgaccccttagtacttgcattctcagctcactaaaacccacaggtaagcgagtgccttcattctatttccacacatacacatgaagtatgaaacatgggcatcatcaatgcatgacccggctaggaacaaatccttcctcgcaagggtaacccgtcatgcaccccccatgtacatacgtaacacaccatgtgggctcatcgatacactgaccgtggctaggaacaaatccatcctcgcaagggtaaccaaccggtcattgcatcccacgtgtacatacatagcctacaaccatgggcaccatcaatgtatgacctggctaggaacaaatccttccttacaagggtaacccatcatacaccccccatgggtatccatgtatatccacacacaatgacattgttcacatcaacattatttctcatcaatgtcattatcaacctcaacatcatatcatctcaatatcatcatcatgcatatcaatattatctcatttcaatattcatcaacgctatcaaaagaaatcatatttcacatctatacataatacatatgcctgagattcacattccccaagtcttcagacaatccaaatttcatacattcacaattcatcatatcacaagaatgatatttttaggaaaattctaaattaaagaggaggactacaaagtataaaacacactcttatgcccatttaaaaatttaataaagaattaaatatgagaatatattataaaattttgggtagagtctcctctgtaactaaggcttttcccaaaaattcaatcattacaacgacaatattattcatagtttatccatcaacaagccgattcatcgcatcccattggttaaaaacattttttctagaaaacagacacacacaggaacaaacacataccaatcataaatacattgcatcccattagttaaaaacttagtttttcttgaaaatcagcacacagcagggacatgcagttatcttcatagttggactccctggcccccaactatggtatcaaaactataaataaataataaactccccttacctatctaagggttcttcttgttacagcctagatgtgttgtttcgtgatccttctaatacacgtgcttgtctgaatgcaggactctatataccaaattgaagataacttagtataaatttcaaggacatacttaacattaacattcggggtcaaatacccactcaaatttaaaaagaggctaaaatggtattttgggagtccacatcaaaagacatcattttgaaattctgatcacaccaatgtgaccaggattcaacaaggatcacataaatgacatcagtttcataaaaaggagacttttacaacatctcattttcaaaggggtttttcaaaggaagtgtaaaactcccaacaacaatatctataacacaagagacactaatagaagcttaaactagctaggagaagataaaagaaaccaaggttacctcaaggaaaccaagaaaggaggattgggagctccgttctataccggagctttgagaagattctcgaagattccgctccgattaaaaggttcttcaccgtgtcggggtctcgtggcaagcaacagagttccgtggttgtctccggtggctgtgggtggtgggggagcttgggctgtttggaggaggaagaacctccattctcatgacttggaagctttaaaacgtattatccacagcctccactcgtctaggcgaacaaaaattgcctctaaaactcacctgggcgagcagaccagattctggaattttctgcttcagtgaaaaattaatttgtcacgttacagacattattttaacaatcccaacggtcaaacacatgggttaggaagccagatttaaaatttgaagatgatccaacggttaaccaatccataatgatgagtttactaaaacatgtttttgggtcaaattcagaaccactaaattaccacacagttcaaacaaacttcgtataacttgacatctacaccaagcaattgctcatgaataattcccataacatttaaactaattataaactaatcaaatagtcaaataacataagaaatacatcgaacatctatttttggttattgaaattttggggtgttacatcttcactatcagcagcaacagcaggctcaggttgtgccatttgtgaaggcacttgttgatgatgtccagccatcacccagccatcaggagtcttcatcaatccaagctttgtcaagtgcttctcttggatgaggttgtttgaagagctggtgttgtccaccacttcattagaaacatcaatctggaagtgatcaatgaatctagagattagaatggggtataggaagggatagttgacaagcctttttaattttaacattatctcttgaaagataatgacccagttcatctgaatgaaatttgttataccatacatcaattgtatgtcttcatcagtggcttgggcatggtttgttgcccttggggtcagaatataggtaattagatagtgaatcagcctgttttctggtgccactggaccaatactcaacctattcctaataggcatgtttgggtctatgagcatttccctataaatgcctattttattgtaaccattgggggtttcttcaaactttctctccccttgacactctaccccagcaattgactcccacaattcaggagtaatttccatctcaacacccttaacagtggacttaaggttgccactcatagatgccttggcacaggtataaaagaccttaaccaagtcagggtagtaagtacccttcatctcaacaaatttcctaagaccttgttcttctaagaatgcaggaaatgtgaaaccttccttggtaaaccagtcaaggctcaggtatttgggtaaactaatgggtttggtagcattgaattgaacgtagtgcattttatcagattctttgttgaaccaaaggctcaacctatctagaggtggttgaggttgtaggttggaggatgactctcctaccttacgtttcccagtcctagcacgtttgggtgtagacatgtttaataggaaataaggacacagacaaaaggttgaaaacacaaaggcttagacagaaattagagtaagagaagacaaggttggtgcaaggttatagattgacacaaagccactatttatagacaagaatcacttaccaacgttcagattattcaaaaatatagttgttagagacagttaatgccagttaatgacgatttagatacctaatccactggattgggcagttacaaacccagaaaaactttcagaattcaaataaaagcttaaataatcgattaaaatttaaggtaatcgattatttcaaacactctgaaagcaaaattaacacactgtaatcatttatctcttaaggtaatcaattattttggaagttttcagaggttgaagatgagttgtaattgattattttggtcaacatagcaatccatatagatatcagagcttatttaatcgattatcccgagtggtaatcgattattccaggaagatcaatatttctaagcttaagtgtaattgattacaagcttgcagtaatcgattattccagtgagacacatagttataaaatgaattttgatcaaagtaatcgattatcaggttgtgtaatcgattattccaggagaagacaatttctgaaatgtgaagaataatcaattacctaatcaatgtaatcgattacttgagcacaacttgcacactgaatgtgatttttaattattttaatcgattaacccgtggtgtaatcgattattgcagcagatttatcagaaacagagtatttttccaactcgatacgaattttcaatcatttaataataaatgtggtattgaggctttaatttgtcatgagaagcatacattaaacaagctagtatatattactttcatcaagaatgcctagcatgtttctaagtgcacaacaccattttgttgaggtgttcttggagctgaaaagttgtggttaattccattttcctcacagaatttttcaaaatgttcattttggaattctccaccatgatcacttctaattgagataattttacatcgtttttctttttgaacaagtttggctaattttctaaaagaatggaaagcatcactcttggatttcaaaaacaaagtccaagtaaatctagagtaatcatcaacataacaagtccatagtaattaccacctaaactcatggttctagaaggaccaaacaaatcaatgtgcagtagttcaagtggtcttgaggtggaaacaatgtttttactttgaaaagagattttgatttgtttcctcttttgacatgcatcacatagtttgtccttttcaaatttgagttttggtagaccaataactaggtcctttttaatgagtttattcatatggtgcatgttaatgtggctagctctcctatgccacagccatgtttcatctaacttattcattaagcatgtggttttgttgaataatgcatgatcaatggaaagcaaataaatgttacctttcctcttgccaatgtggattacctctccactcttaccatcacaaattatgcaacaatcttgattgaaggaaattttatagtctttatcacataattggcttatacttaatagattatgctttaagccttcaacatagagtacattactgatttttgtattgaagctgtcaccaatacttccttcacctataattttccctttgttgttgtctccataagtaacatagcccccatctttaagtgtaagatttttgagcaaggacttgtcaccggtcgtatgtcttgagcagccactatcaaaataccataaggaagaacttgctctaagacatatctacaaaaagaacaaatcacttcataggagaaggtacccatttgagtttgggtccaaaggggttagttgcttgctttttcttttctacccaaatacactcaccaattgggacataaaatcttcttgcaaagcattggtaagatgtatgtcctctttccatacaatagtgacaaacaacagctttatatgagtttctaaagaacctcttttgattgaaacttggtttctttttcttcttctgttttggaggtacaaatgttgttttttgaacacttttaaagctctttttgtaccctaatccagaggtgtcaccatattgtttttgagcactcaacatatcattcaaatcactttttcctgtgttgagtttttccaagatatcaatcagctcattgttctttgaaacaatctgcatatatttttcttcttgattcaatctatactcatcaaaaactttttgcaacatatcatatttgtcactagttgtagaggaagaagcacaaacacaaccacttgatttgtagcttgaagtaagtttctcattttcttccttcaagttacaaacttcagtttgtaattccacaatttttgcaagatgatcttcaatgtttttcttaagcttattgttggatttagcaagctttttagcctctttatgcatctcttgaaaagcaaaaatagcttgatcaagttcagagtttacctcatcatcttcatccaagagatcatcattctcttcattaacaagtgaggtgaggcacatgttggcttcttctaattaagtggaggattcggaagttgaagattcattgtcctcgctagcaatgtaggctcttcttggctttgcttccttcttacatttgctatcattttgttgtttcttcaagtagattaaacattctgactttatgtggccaggtttgccacattcaaagcatgtgaagttgttgtcaatcttcttggtgttgctagtgttgttgttagaattgttcttgttgtttcttgtaaatcttttgcccttgttcttctttagaaacttgctgaactttttcacaatcaagttcatgctttcttcatcttcctcatcacttgagttttcttctttttccatcttaggtgctacagcttttagtgcaattcctttgccttttctttttgcatcttcaccaaaggttagttgagataattctaattcatactcaagtaacttaccaaagagggcatccgtggtcatttttaaagatctttagattctttgatggctgtcacttttggttgccatgctctagtgaggcacttcaagattttgatgttcaattcttcaacatcaaatgtcttcccaagtcccaaaagatgattcactatgtatgtaaatcttgtttggagttgagatatgctttcatttttgttcattttgaacatctcatattcatgtatcaaagaatgctttcttgatctccttacttcttcagtcccttcatgggtgatctctagcatctcccacatttctttggcgcttgtacatctaacggttctgaagaattcatcagaagaaagagcagaagttatcatgttcttagctttaaaatcatattgaacaattctcttttcatcatcattcatctcatcccactctttgggaatcatgttattatcaaccactttgatgggcaccctaggacccttttctattgcattccatgctcctggatcattggattgaataaagatcttcatcctatttttccaaaaactgaaattctccccctcaaacaaaggaagtctgcttaaggaggcacattccttgaaggttatttgtgaagtattcatttttgaaagaaagtgatcttgagtaactttcaagacctagctcttgattccaattgtaaacaatgggaacacttcacacttaaccaagagggggggtgaattggttaggcttggtaattttataaattttcttgaacaaaatcaaagtttttccctttggatctttatcacttttgaaaccaagaacctttattcaatctaatgctcagtccaaggtatgcaatagctcaagaactttgttgataacaaaaacacacaatcaagaataacagaatataaccaatatagagaaaataaacaacacacaaagctttatattggttcacttcaaacactatgaagctacatccagttttcttccactcaacactagaatggagttccactattgcaattttcagctcttacaagctattacaaagtctctctttatcaaccccagataaagttcagaaatctaaaacactattagattcttagagacaagccactgagaacactactcagtttaacccctagagaaactctatctttagattacaagcaagaaactcaataacaatagtcaatcaaatacagaattcacaaaagaaatacaacctcaaagtttaaggaaagaagttacctgatgattcaatgaatgatatgcatatgaatgattacaccaggttgaataatgaatacaaactcagaacatcacttcccttaagctttgaaaaataacttcttgcttttagaaacacttaacaacccatgaatgttttgtgaaaagcaagaactctatgaacccaaaaaatcactaaaagaatgtttagaaagccttagaatgctcagaatacgaattgatcaagttagtaaaacagttgagcaaaggttctatttataacaaactttctaactgtcagtaatcgattaaatacgctcctgtaatcgattattttgcttatgtaattgattatttcaagactgtaatcgattaacctgttcaacaaatttctaggtatgagcaacaaacaaaataatcgattattccaacttgtaatcgattaaaccagacagttgctcaaatataaaagcactgtgtaatcgattacaaactttggtaatcaattaaactaggaacctgcaaaaattgatttgaactatgtaatcgattactacaattggtaatcgattaaaccaggaagcaacataaaatggtttgaactctataatcaattactacaattggtaatcaattaaaccagcagaacatgttaactatagcatataatgtaatcgattactattcttggtaattgattaaaacaggaaggtgatatattttgattagcctatgtaatcgactacaaaatgttggtaatcgattaaactgttcatcaaagctatttataaatgacctaaggtagaataatcgattattccgatatgtaatcgattactttgttgtaacaacctaatttctaagttgattttattactagcatttttacttagaataaaattttttcaagaaacgtgtattagtaaaaattctaagtcattaaaatttaaaaaatatgtaaagactaatacattagtcaatgtctctgttacaaaagtttatacaagtacaaaactcttttcaaaatccagcctagtacatagcttcttcaatatatcaacactactccatagcctcaaggaatctgaccagggctgccatctaagaaaaacatgaaacaaatcttgtgagaaataaatttctgagtaggcaaagctaaatctcgaccttattagtaggttagtaaaatcattcaaataatcaaacacatccacaagaaatatgcaactatatgaatgcatgagatgaactatcccagggcaaatggcctccacatatcgtattgtatgtggccacactgagtgtggacgctgcatagtcttacgcaaacatgcatgaattttgccatatatccttgcacctgggtactatcgtactgtatgtagcatcagattttgttttcccaaagcctcgtactggacttggaacatggaaacatgaatccacctatcttattcacatcaacatccataaaaatcaaatccataagcaaaatacatattaccttatggaaaatattttcatcatatcatcatatgtatcataagtatggttaaactgttatatcttattcaagcaaaatcattaccaacttaggcatgaccaaagaatatcctcacagaaaattatgttagtaatctaactaataatccataatatgtctttcaaataatttctaatcccttgaaattttcatgataaaagattaaagcctagtacgcatcttttattctcctttcacccaccacctcactaattaatcctcaaatcaaatcatcaagtatttaaaccattcaactacataccattcatcctctacttcaaaaattaaatcaaaatcttttcataaaaatatcaacagacagcccaaaatatcatcaaaatcacctaaaaaaaacatcaaatgggcttccatacatcactaatctttatgcgtataaatcaacacctatcttatgacttaaatcaacatattctcatcaaagaacaaccttcaatatcatgaaatttcaagcctaaataataatcataaatcatcctactaaagcatgtaaattaatccaaaccattgattaactagagatttaagcttaacctacctcaagtaagtttgaatcttgaaaatataatggataaatggcttccttctttccttccttgggaaatcctcttagagatgaagccttgatatcgttcttctaagcttgtcaaaactcttcctaaggttgttaggtttctcacgaaattttgtcaagatggtggagttttcttttcttacttgattctaactctaaaggagaaagatgaaatgaaggtagtatgaagagaggatgttcacgtgaaggtgtagagaggaaatcttggagaatgtcttgcacttagatcctccttccccctttatatagtggtttaggattcactttatggaaaaatatctcctacaccataatgacttacctttccacttgtccacccctttacaagtgtccctacacttgtccaaatcataaaggctcttaattctccaccatccaagtgtccaagctcttgaagtttctccatttctcttgcattttcgtggagtagcttgccaaggaagatttttatgctttttctttcattcttgagtttatcccaaacctgttttagtaaaattctaattctggatttgataaccgttggatctctttaaaattttaaaggtacactactatcccaaatatgtaacttttgaccgttgggattgttgaaataatatctagatctgtccacgtgttctaccaaaggagataagagaagatttttcttctcatcttgtatacatattccaagtgtccaccacttgtcttcaagtttgcctttacaagtggcttattcatgaatcttccccccttttctatatcattccacatgtgaacttcaagcttaaagggtaggatgacaagtttttcttccttttatgccattacatgttatttctgatgctaaagtaaaatctaattccacttatgattttccacatggtaattccttatatgaagttaactttaatttgaattctttcacctaaaataatatgaaataatataattctagagatctccaaaaattatcttcaatagcttataatcaatttctacagagtactatacagacctcaagcacaagattgtccttatcttaattccaattggtctattcttcttctgaccatcaaaattactaaaccattttattaaataggtctatacatgctataattaagagaaaattccttagattatatgtatcattttttccatatttttcttatgcttgaattttcttaaataaagctttgaagttattatcttgaaaaatttctagaaattttattctagagttttgtgtcacaaattattttgatacttagtcagctaagtatattctataattccatcatgtttctataaaatttctaaagttatttgagcatttttggcctagtggcatattggtaattttgtcattcatcctaggggcattttggtcattttcaaaatatgcaagggcatttttgtaattttgatcttaagggtattctagtaatttccacttcatggaaagagtgatttagtcatttttctttaaacatacttgtatctaaacatcatcatatttccacaagtaattataatataatttcgaggatgttacatttgttcttaaacagatttccagaaagcaccaagaacaaaataatcaattcttttcttgatataaacgattaatccagtatgaaatattatttttccaaaaactcttgatttatttcaaaactttaaacaaactatcaatgctttgtgaattctatttcttaaaataattgacttgatgaatgatatgatgcaatgtatttggatcaccagacccacttcttccttttacatttaatcacaacatgttcttcaatccttcaaggcatgttgaaagctaaaacttgaaccttgaaccaatgtttgcttatgcttcaagcagctccccctgaaatcaacaatctccccctttttggctttaaacatgccaaatttttaattgattagcaatgggtctttgagtttaaattgaggaaccaccgtagcatgtgttcaagctttttcaaacctgaaaaattcaattcctttgcaagaaaaagtgttaaaaacatctgtgattaacgtagcattcattcatatgacatatttacttaatgcaatcaatttgaacagttttctccccctaaatttcacaaaccaatcagacgaatttttagccaaaaacttgcatgaaaaataggggcaaacagaggtgtatacagagcaatgctaaattcaatttctctccctctatttggcattttaaagtcaaaaattgcaaggcacagtggatttaagtaaatagaaacataatattgcattgatactgaagaaaagattacataataaagcttaagaaaaaaaaaacagagtacaataagcaaataacactaagacttaaaagtcttcagaatcattcatcctaagtgttgcttctatatcatctagtctagcattgatttgcctaaaggatccttgagtttcagccttgaactcatgatgcatttgaagcagcccatccattttggccagcattagggactcaaattgtgtgtagagaggttgttgaaaagtttcttcctctcctttagaagcagccactggatcttaattatcagcagcaacagcaggctcaggttgtgccatttgtggaggcacttgttgatgatgtccaactatcacctagccatcaggagtcttcatcaatccaagctttgtcaagtgcttctcttggatgaggctgtttgaagagttggtgttgtccaccacttcattagaaacatcaatctggaagtgatcaatgaatctagagattagaatggggtatgggaagggatagttgacaagcctttttgcttttaacattatctcttgaaagataatgacccagttcactaagaagagctgaagcagtcgatcactgagaaggttactgatagagtgattttagttaaatttttttctatcattcttagcttgtttgacctcttttggacttttatttttccattctaattcagtttttggcctaggcaagtaagtgggcttaattgctaattgtagtgtattttcggatttttgctcacttgacgtatctgacttgtgcagggtctatagagtgctaacaatcttcgaatagagtgttctaggagtccctggaaagataacaaaaagatctacaagtttgctagaaatagaccaaggtcaattctgtcattttgagggtcattttgagcttcgaagttagcacctctgcacttataattttgggctgcgaatttgattttcatggttgtaaatagtaaatatttagattattgggtttgtttatggcccattctattttcagaacttagtcactaatatattagttactttagtgaaaacttggacaacacactttacaattcaataaacaagttttacaattcttttctttagtttttagaatcaaaagcttgttcttcattttctctcaagtgttcttcattgttcttcatcttcttcatttccattttgctattcttccatttttatgcactcatttcatggggctttccttggtgatcatcatggaaggctaaatcattaatcaatccaaggatctaactcaagcaagagaagaattggagttccgattcggtatttcaaattctacttgcatgttcacctgcttcttcaatttctattatgttttcatgattaagaatgcatttaggattgaaagtgaattaggattatgaattcatgtcttaatttcaaatgataatcacaagattaattgaatgatatttcagttagggttgtggtttcaatcaatttaggagtagaatcgattgaattgcttctattgagattgaatgaatgttcatgttagaatcaacttatgggaatgatgatgattcaaatagcttgggttggtgaattggattgatgctttctaatttgttttactttactccttcataatcttgttaaattttgcattgttctttaattttagtttgtgttcttgcatgttttactttacgcataccaactgtttgacaaaatccccccttattattaccaatgatttgaagctagaaccatattgatcgtgtctctgagtcgacctaggttagctctgtactacagaattagcttagtaaatttgtttttgatgcgtctcgacaaagcattatcagttacccagcagctgatgatgtccttcagccagctgcagtcccaaaatgcctactcagggagccatgttgcctccagaattcaagacatgtctttatggtgcccgtgtcagcaccaagggaagctgcgtcgatccctccggtaatgacctagacactggtgcatctgacaggcatgggttgtatgttgacgacaatcctccctgcttggttgctattggaagactttatgagggaattgcactaagcgagatattcgcactaagcgcaatttcttcgctgccaaaagaattgtgcttagcgagctgttcaaaaatcattagtgtgctctaattcaactccttgtggcttactccttccttgtctttgatgagaagttcatctttgattctcttggccatctcttcttatagaagcttggctttggaccttgtcattgaacccttaaactcatgaagtgcttctaggtccttatgctctttgaataatcctctatcatctcctccttcttgaaaagaatccatcatcggattatgctctttggatagtcctttatcattgttctgacaaaaagaaaatcaatacaaactgaaaaattcaaccctttcaaaagcactgcaacttcagctgtcatttgcatttattcagaatcttaaaatagttttccctgatgatagacaaaaatgtcaaattatgaagaaaagcttagcaaaacataataacattattcacttccaatattctatcaacattcataattttaagatacatttggtatagaataaatttttttctctcttaatttttttaatatatgtaagcatgtcatttttacagcatgttaaaactatgttttaaaattaaagaattaaaaaaatattaggcaataaaatatttgactattataataaccctgagtcccagcgcatacagcgcgagttttgagcgcgaacggcgctggattctgcagaactgtggcgccaggttggcgctcttggcgccacagtctccggagtgccgcgctcttggcgcgggagtggcgctcccaacgccaaaggtcctggtggttgacgcctggggcgccaggctggcgcgggtggcgctagaccacccagaagacctgttcttctttccagttggcacgagtggcgccattgtggcgcggtcagcgccaaagtctctggatattggcgctcttggcgcgggttttggcgctggaggcgccatagtccctggatgatggcgctcttggcgcgggagttggcgctcttggcgccagaggttctagaggttggcgctctgggcgcggggttggcgcggatggcgccgtggtcacttgcagctggcgcgatcagcgcggcagctctgacaggaccactataaaaggctggggtcatgattttgggagagaaaacatttccttcttcttcctccagcaccccacctccattgttgaagctccaagcttcattccttcgctatagttcaccaaaaacacttccgtaaacaccattcatgatgggaattacttgtggagcttaaatccttcctcgttccacttaaaacccactctttgtgagaatccctttctcaagggaagttcgtagaactcgagttcggcgaggaacggcggcgattcgtggttacccaagctagggggagtcgtccttaggccttccttgtcacctttgaggtaagaaactcgagattcaccacttgttttatgagttggggttttgggtgaatagtgacccacttgtgatagagctagtattagccttgggtcctctggaaacatgtgtttaggatgttatgaggatgtaggattagctctcaaatgtgagtttggtagactttgattgctggactcttggtaaggcatgtctagttgaatgctgagttgcttagctatgttgtgacatgtgagagccttggttgtggctttgatggccttgggaggctattggaacggtgttttgtgtgtgaaagaaccgttcaagccatgtgtgagccattgagccttgaacttatgtagagctttgagcttttgatgttggcttgcaccgagtcttttgatgactcaagtgtcgtgtgggcatgaggtagaccactgaaggtctatgagatggcttgtgagtgataagcctggatgaaccttaggttagatgaccttgtggttttggaaagggttgtgagtcctttcattgtagcggttgagaaccgtgttatgtttgtatgccttgtatggctgtgtggatgtttgatacatgtttgtatgccttgtttagggcgtgacaccgcaagtgtcagtggcgtaggccacagagcaagggaagaatcgcagagctcggctttgtcaggtaagttcttggtcccttggggatgtttcccacttgcttgtgctccaccatactccgagggagtagtggttacattcatgatacatgcattattggttgttgcatactcatgatgatatatgcttgtatctatgcttgagacatgtatgaagcctgttatttagatcttttggtcagttagatatatatggacctccctaggagtagagcgcacctcctagtttggtttgctcatggttgattggatcccggggtgatgatgatcccctaagaccaagagataggtgtgtcccgtcgcggttgattgcctattctcggaggtaccatatacgtgcgtctatgcgtaaagggtagctcccgatgggatggcacgggtgtgaattctggtttcacactgaggtcggcgttgactccgttcgtcgtacatagagctagatagcttgcttgtattgttatgagggccgggaggccagtttgttgtgataccctgatgacttgtgtcatggtgagtgagccagggtggaggagatgtctccaaggaccctgagcttactgagatgtttatctcaccccatgtggggcttatgttatttcaggtgatgcttttggtagagaggagcggtctcagggcgagaggccctagtagagatagtacctgcttggctgtaaggcagcagtggagagcttggagctcggctcagcttttgatgttttgtacccctgtagagggaagacatgtgtgtgcacatgtagtctttgttttatacacgttatgtatgtatggcctcgtgtgaggaagggtccttgggatcagaagcactcggatgcttattcttttgtatagacactgcaagtgtcagatgatgttttgtacataaccaattatgttatgtaattatgttcctcctgtttatatctttgagatatttgtgttatctgcctatggttttgtttatgtgatctggattagcagggacttgtcttatgctttgtgatgagatgctttgatattccatacataatgtaatcaagaaatatggttttgaattatgcttctgcaagggtttttaattactgtgattaagcgctaatctgatataatcataatgataatacgccgggtgcatacggggtgttacaactataattcctaatgaattttagttcgattagagctcttattttgtctaccgaatcttctaatttatttgaatctgaattcattagacaattatatatttttatgtgttaaaaacccttaggccagtttgttaaagataagaaaaattattctgatgtagattaatataatgattatttattttagaaattgaatataataatttatatgtgttttgtttacgataataaaattaactttctttcaagaaagaaaaaacaacaactgagtatatgagaaacttttcaaaataacttttaattttaatcgagtttcaaattattttcaactactaatgattttgaaaagctaaaataaatacattaaacaattaaaaatgattcttttaaaattatattgtaacaaaccagctcttattccttagagaaataagaaatagcaacatatatagaagaaaggagattaaaatttttacccaagtttcctaatagacttgtttgatggttaattatgataagaattaatgtgagtttttgaaaaacaaaacaaacaaaattgttcagttcatttaagaaattaaattaacggtactaaaatagtgaagtggtagtataatcaaacttcttattaaaaaaaagtcaagtagatttgctgcacaaatatgtgtatttacatactcttcatcctcaataataagaaagtacttatataaaaatttaaaagttaatttgcatataaggcaaaatttatgttttgtaataaatataacaatatttgctccttagcataaagatactaacttggtgactaatttttgagcaacttcaattaattattttctgaacctggaaatattattagaaaagcacaaatggcctccacaaactcatgaatgggatgacctcttattcttacaaacaagagcttaaacacaactactttaccacaattacaataatgatagtttgtgttctactatattcttgcatgcatttttttctttgactccattgtcagtttggtggctaactttaccattgcatatttaaatttattttcttcaattgcaaaatgcaagcttgagaagggcatgctatattaatcatattgttatgttagcatgcaattaatctcagttgtgtttccacaagaaaaagtttagagacattggaaaaatcttaagcctttgttttcaatgaacaagtcaataatatcaaggatggagcctttatgctttttttaagaaatggagacccattttgtaagtacaatggttttcctaaaggtatggtagagaagaatcacatcatcaaagtggacttagcacctgcaaaaagaatcaatattccatacacacaaaaattaccaccatatacatcttgggtatatgtggccaggtgaatttgacgtttaattttaaaatgttgtatttttgtccaaatttcttagatgtatatggtgataattccactgcacgtctaagacatatggataaaaatatagtatttaaaaattgaacataaaattcatttggctatatatatccaagatgtctatggtggtaatttttgtgtgtatggaatcctaattctttttgcaggtgctagttcactttgttgatgtgattcttctttaccatacctttaggaaaaccactgaaccaacaaaatgtgttgtcatttattgaaaacaaaggtataaagtcctccctccttgatattattaacttaatcattgaaaacaaaggtttaagattttttcaatgtctctaaactttttcctatggaaaaacaactaagattaactgcaaaataaccaaaaatatgataaaaaaaaaatgcccttctcaaggttgcattttgcaattgaagaaaataaatttaaatatacaatgataatataatgaaaacaaacttagcaaaatcatgtttggctgcaaaaagtaaaaacaaaaagaagttcaatccacatgtattgaagcaaaggaactacatatgattcataaaagatattcacatattcaaattcttgtgatatttctgcacacaaatataaaggaatgaagagttgttaagttccatgcttcaatatttgattagatacaaaatagtatactattttggagttaagtttgaactatcctcacaatatgatttcaaagaaatggaatgagaggaaaacaaaacatagaaccaaatacaacatctaaatgaaaggaaataaagaaactgagagaacaaaggtgtgaggaaggagaaacaaactcaatgtttggagacacagttagtagtgaatggattcacaaagagtttatgtcaatttaaaggagaaaatagtgagagaagtgagtgagagaaatgaataaaagaagtgcgaggagagtgaattgaactaaaatattaaataagagtcacactctttaattaaaattgagttgaccatccaccaatatattttcataataatatttgagattaatctttatgtacaatatgtatatgtaagaattttatacgatgaggaaattaagaatgtgttttcttacgcacttaaagttagcatattttgtgatgtaaggtcatgttgcattcacatgagtgtgaatgatctatttaactggagaacctgtgttcgattcccttcatgtccaaaatatatttttcttttattttagcttattttttctctcttttgtcttatttccactttttcttcccctctccctttctatttcttagtcttattttcgatctatctttatattcatctatgatcgacccaattaatttggattaaaggtgctgttgatgttgatgttaacgttgaatcaacgacagttatgtactaggagttggattagtcttagtgggttgggggacacttatgatatatgataaatgacaaaaaaaatactaaacatatttaattagttaatatttattaaaaaaattaaattaggtgaaaggtttattaaataaggaacgaaatttacataattttgcaatattcaataaaatttcattaaaagtgtagtgtattataaggaatgtttttagtatttttctaccattttaagattcaaaatatgtcttctttaaacttgttgatttgtaattcttttttcttgatactttaataggaattttggtaaataaaaaatattaaatttaatatattaaaatataaaaggtatttattatttttatcattaaatattttatttgaaagaatttttataaaaattgaatagttattaaaagagaaatttaaatttattcctatttcaagtatttgccatctgaatttcccttaaaagaaataaaataattaatatttgcatcattttcttatttcatgtatacaaattaaatgttattttagtctctatattttgtgggtgtaaattgttttacactaccaatcaataaaaaaatattgtagatgtaatttttattatatttattataaaagtcaacaaatttatgaaaatttgtgatttagtgatggtatataaaaactcacttgcatactatatttactcaatatgtgtagttttgttttagtaaataataatatgtgcaatgtgtaaaaatatattatattgtcatttaatcacaaatatcaacatgtatggtaaattagttgactatataataactttcttaaaagtcatatcaaaaaatttctaactagttgacaatgtaaaatattttacatcattagttcatataaattaaattattatttttataatatcatctttattattttattgactctaaaatttaatgttttatttaatttatgttatttgatgagatttaatcatatatataaaaagtcatccatttattttaagaaataacattatttgcattataaaaatattatactaataggtgtattaaataatctttaatgatattatcaaaatattcataatatttaatgttattattgaattatattatattatttaatgatataatatttaatgctgtgattaaataatattaggtgtattaaataatttaattatgtatatataaggattcatgcatttattaatttttaacaaataatataatattatttgtattacataataattaatgatataatatttgatgatattatatattaaaaatttcataatagtaaatgttattattgaattaaattatacttagttagtgatataatatttaatgatgttattgaataatattaattttattgaatattttttcataaatataatatttaataatgttattaaattaaaatctacatcctatgtatttaataattgatttaaatacagttttggttcctctatttttcaaaatctgaaattttaatcatcctaatttaaaatagagatatttagaccccaattttttaaaattcataattttagtcctcctatttcaaaatatagacatttaggctcctattattataaatatgtaatctggtccttccctaaaaatattgattatgacgtagattaaactaattatcccatgccacatagctaaaattagaccacatcaagttcatttcttatcgacaatgctttttgaatttgacggaatgatcaaaattgtgaaattttgcagaactagggactaaatgtctctattttaaaataggaggactaaaattttataatttaaaataggagaattaaatgtttctattaagaaaaacaaagtgaccaaaattatatattttttaaaataagggaccaaaattacatttaagtctcaatatattcatttattaatattttctaaagtaaaatattttttatttatatatttatataaaaactacgttaatatgctgtattaatatttgtattcaagttttttttttattattatatacatgtgtgtgtgtgtttttttatgtgtgttaatttgtttgcttaaaatatatagaaggtgtgtcttattaaaatatttttgtaaaaaaataagtgtcaaagttaaaaacattgacataagatttactaattttcactcacatttttctttcattaatggtttttttctctctcaaatatccttaattaataatttttagttaaaatataataaatgctagaagttactccctccatttcaaaatgaccaacatttataaatttgttaatattgtgactggtatttataatatgagatattgaaatttttattctaaatttgcccctaataaattacatcaatttaataattattaagtattgtacctttgaatttatcaactaccaccattaattatctaagttacaagtaatgtatttatgaagagtaaagatattttagtaaaattatttcaacaattaatttatttattattattaatttgtgtaagagaaaatcttcaacatcagtcattttgaaacgaattgaacggagttaatgaaataaacttattttctttcttatttgagtactaattaggtaagaaacaattaccgtaactagaaagagtatcttattaattttaaaaataagaaagataattttggaagaacaacacaaattgctaataaatttaatatcattgactaaattaacctattttctttaagggtaagaattagtcgaaaaagtcttatatataaagacgaaggaattatttatagtaaataaacgtttaatgaattttatatcatatataggtattcaattgcataataatcattttgtattaatagtaatttttattgccattttaaaccagttttagtaagtttttctctttcaaccatgatttttcattcatagcacttaaatttgagagtttcttttagaaatttaaacctaattttactcaaatcaatgtaataatggctctacgttaataatgtcaatactatattaataataaactcacacacacatttttttctaaacacacacccatttatttcttgataaaagtattttactgatttataattttattttcttaaaatacacaagatgtcttattaaaatgtttctcttaaaagtaagtgtgaaagtttaaaaaattcatgtatgattgactaactttcagtcacttgttctaaacatttattaattctaataaatttattttctttaataaatataatgtttaataatatgatatatgttaataaaatatattttaaacaaatatgcataataaataataatatatataaatttttatgttaaatttattatgaactattttttcttttactgaagtaagaactaattttcaaacaacagttaaaaatataaaattctaatttatttgtacaaatatatgttttgctactaaattttataataactatgttttgtttaatatgaaaataacttatttacttcaaaaatcacattaaaaaaaccttcaaaagtcacataatcttttaaaaaaatcgtgtgtttttcttttaatctcaaactcaaacttcaaatataatttaataatctatatttgtttcactcatatttatatttgtatttagaagatcactattaaaaaaatagcttttaacatcgctacgttaacattgattttctgaaaaatcaatgttaacgaaaacgcggtggctaattcgtaattaaaaggagctatttaacattggttttcttaaaaacacttaaaaatcgatgttaactagtccctattaacatcggttttcaagttttttaagaaaaccaatgttaaggtgaactagttaacatcagttttcaagttttttaagaaaactgatgttaaggtgaactagttaacatcggtttttaagtttttttaagaaaactaatttaaagtggactggttaacatcggtttttaggtttttaataaaaccgatgttaaggtgtactatttaacatcggtttttgaatgaagatcgatgttgttcttgttattataacacatctggcccccaaatcaaataccaacaccgtcgcgtgcttctcttttccctcatccctaaccccaactctcatactcactggccattttgcatccctaaccttagcttttacgctcgtgacctcagtctcaccatcttccagagttgaagcaaacgacgctctcgctacctcatcccaggcctcatccctaacctcgctctcgcacgtatgctctcggtcacagttgaagcaaaccacgcgtctccatcctaggttggtatcaactaacatcgcgaacttccaatgctattgttgtcgcaagttaggtatggttctgcattagcatttttctgtgtggttgaatgtgatattataattgaataggttggactcaaggttccattttgtgttgaactgagcaaagctttacatgtctatcttctttagagcccacctggtggaagccttgtgcattcagttgtccttttgatttttgtttgctcccatacatcacaaggtatagttcatagtgtgttggtactaactgatgtgtttaaagtccaaatattgtttcactaattcttatgtatatattatagtaatagtggctctggatttcattaataaagggaagcttattttctagttagatcatggtttgcacaatatttgtgtatataatttatgagataatgggtttgcttggttgagtaggtagttagatggaaaagaaagtcatgatgaaaatgactttgaactgaagttattggtatgagtaggagtaaaattttaccatcttctcatagttttgtagcaaatattctccccgtatggctttaagatgtttgcattatggatggaagataaatagccttctcttgtgtcataggccaacccttaaaccttgttgaccttgaccttagaggtaacttcttggagggtcccacatcatcaaatcattttggaattgtcttgaattcactttagcaccttgacctctcctttaatagattcaagggtgatgttttcaagtccttcatgaatgtatgcaccttacattctttatacttgcaatacaacaatttgactgaagaccttccatcaatccttcataatttgtctagtggttgtgttagttacttcaaaattgttataatatcaaaagttaattacttcaagttgcatttgaaatccaaattactaagtactttatcattggccaatcttgtaattctttctatagatttgtctcgatctcataagccactacaaagaggattcttcatttataacacatctttacttaccaatgtgaacatgcataacattctattatagattcatttttcaaattaatagaaaaaaaagaccattggacaattgatgcaaacctaggatggttacaattgacaaacagaacaagctaaatatagaataagcataaccagattggaaattgttgaagcattgtggctttgttggttatgacctttcttacttattttggctgtagtttgagctatggtaatttgatcgatgaatttttgatgcattgggaagctaattaagagaattatctataagtctaatttcattcttcaacatctgagttgtggcttctatcattgtgaaaactaggatggaatttgaagatgaaattctaaacataattattgagtcatttacaatcaattgggcctgtatttggttttgatgtttatcttctattttaggctttatgtaaactcattaaggttaatatgtgagggagtgtccgcactattataaataggacacccatcttttattgggttaaatttgtaattggttcttatattaggtctgaaagtaatgctagataagaggagaagtcaggttagtctccttttgtgagtaggatcaccttggaataaaatttataaacaaagatgtaatcctcatcattagacaaattgaataatatttatttattcatttgtgagagtgagtaaagcattaacttaattcttttttagatcatggattagaacttcttttggatcttgttaaaagatttatcatactaatgtagtgaaccacattagtattttacgaatataacatattcattgttcaacatcatttgtatgtagttgtcgtttacctttttgcatcgtcatcaccagattcattgttggagattgtcattgagcatcctctcaggtacttacgaatgtgtttcttattttttatagcttctatatgtaatacgtgcttttgtaacttgttttatgttattaatgaagttcattatgagtgaaccttagttttccatttaagattcattacaatgattattccggacagtttggattaatcattgtattgattcttgaattgtccgtttggacagtttgggatgactaatatttttttagtatattcatatgtatagtttgtgattcttttgttaaatgtgatgaaattttggtacaatgcatttcagtttgttctctggatgcatacttgattgtggtggaactcatgtcactgctttcatgtcgtgtacttggagaccaaagtgaaatgctgccgaaatttcatcaaatttaacataagaaaatcaacctatatatatgaatatactaaaaaaaatatgtcttcctgaatgggatagggccacaccttgaatgaaaagagtgaggttttcatgcatggaataactttgtgagtattacagagttattaattagatggatcgaaattggatgaatgcaagttgcatcaaggttgagtatgaggaaggcgttgaacatttcttgcaatttatctccgaaaatagtcgaccggatggggatgaaaaatatttttgtccttgtatcaattgtttgaatgggagacggcaagcgctggacgacatacgagaacatcttctgtgtgatgggattaagaagaataataccacatagatgtggcatggtgaattgatagatatgcagagggggtcgcaaactgaatcgattgatgttgagatcggagatcgattagaggatatgattcgtgatctgggacatgagtcttttcagcaagcacatgcccctgtgtatgatacattggaaagtgattcgaagaagccattgtatccagggtgcaaagagtcattgtcactgttgtcagcagtgttgaatctggttaatgccaaggccaaatataggtggagtgacaaaagcttcagttcactgcttaaggtagttcaggacatgcttctagatgagaacatgttgccaagaagttactatcaggccaagaagattctttgtccaatgggtatggagtatcagaaaattcatacctgtcctaatcattgcatattgtatagaaatgaatttcaagacatgcataaatgcccaggtgtggggtatgacagtacaaactgaaggccgatgacgattgtagcattgatgaaagcacaaagaaaggccccccgcgaaggtgttgtggtatcttccgatcattccaaggtttaagcgtctgtttgcgaatgaagatgatgcaaaagaccttacatggcatgcatatgggagaaattgtgatggaatgctctgccatccggcagattcctcccaatggaagaagattgatcgtttgtatccagaattcggggaagaccctagaaaacttaggcttgcacttgccagtgatggaatgaatccctacggcagtctaagtactcagcatagttcatggcctgttttactagtcatttacaacctgcctccttggttgtgcatgaagagaaaatacatgatgttgtgtatgatgatatcgggcccaagacaaccaggaaatgacattgatgtttatcttagtcccttgattgaagacttggcaaacttgtgggatgagggggttgctgtgtttgatgggtattgtaaggaaacattcaaattgagtataatgctattttgtaccattaatgattttcctgcgtacgagaatttgagtggatacagtgttaagggccatcgtgcatgccctatctgtgagcaagagataagttacgtgcaacttaaacatggaagaaaaatagtttacattcgccatcgacattttcttaaaccttatcacccttatcgccgattgaaaaaagcgttcaatggaagtcaagagcatgaaactgcatcgattctgttaacaagagacgaagttgttaagcgggttcaggacatccatattgtatttggaaagacccataagaagatcaaaggtgtgggttgcatatggaagaagaggtcaatatcgtttgatctgccatactggtctgatctagatgttagacattgtatcgatgttatgcatgtggaaaaaaatgtgtgtgacagtgtcatcggcacgttgcttaacattcaaggtaagacaaaggatggtttgaagactcgtcaagatcttgctgatatgggtatacgtgagcagttacatcctaggtccgatggtaagaaaatttatttgcctccaacatgtcacactttgtcaagaaaggagaagataagtttctgtcagtgtctgcgttgagtcaaagtgacacagggatactcttcaaatattaagagccttgtacagatgaaagatctaaaattagttggcttaaagtctcatgattgccacgtgttgatgcaacaactattagccgtggcgattcgagacatcttgcttgacaaagtgaggcatgctataactcgcctgtgttttttcttcaatgctatttgtatgaaagtcgtggatcctgtaaagttagatgacttggaagaagaggcgacaattatcttgtgtcagttggacatgtattttcctccttcattttttgacataatggttcacttacttgttcatttggtgagggaaattaaactaggtggtcccgtttatttacggtggatgtacccggtcgagcgatacatgaagatcttgaaagggtatacaaaaaatctacaccgtcttgaagcatcgatagttgaaaggtacattgcagaagaagctgtagaattttgtttagactaccttgaaaaagcaaaacctgttggtcttcccgattcacgacatgacaacagagtgggagtaaagggtacacgagggctgcatgttataacgcataacttctagagttgcaacaagctcatttgtatgtcttgaataacagtaatgaagtcctgccatacatcgatcgtcatgaagcattactcaaggaaagtaatccaagaatgacgaagaatagggtgttgaaagagcataacaagactttcttgaattggtttaaagatacaatatttagtgctgaatctgcattcaaaacaatcaggaagttagcagatgggccaaaaagaaatgttaagttggcaagggtacgatatcaacaactactccttctacaccaaacaacaagataagaagagcacaatgcaaaacagtggggttagcctaagggctgagtcgcaacatttcgctactgtgcctgaccacaatccacgtttggcatgcttgccttactttggagtcattaatgacatctaggagcttaattatattacaccgtgtgtgttttcaaatgcaagtgggttgatatcaccgaggacttgggattttggtagatcttaacaagctagcttatcaagatgaacctttcatcatggcagaacaagctaaacaagtgttttatgttcaagatccgtgtgacggaaggtggtcagtggtactacatggaaaaaccattgacattaatgttgacgatgatgacgttgatacaagtgccactaaattctcgacacaaatacctaacatcaacagagaagacaaagttgacgatgttcatgcaaatcgtaatgatcatgatgaaggagaatcaattaacatcacttaatctattttttttgttttgttggatatctcgtttgtacacatcttctctttgtttctcgagtctatagtgagttacaaacagggttatgagttactagagaagagattgatggaggaaaaataaaagaagcaattagagggagcaactcgtgatgacagcacggagaccatcattcatcctccgtcccctgtgcgacgacacgtgaagtggaagctggctcgcaccaaaaaaaccggccaaatgacttctgaggcagcatgtgatattgctgagaggattgtaagtcaaacaacaaactggtacacctttaatgaatttttaactcataaattacaaaactaatgttctacttatttccttgtaggattccctagatgagcaatccacacagggtagctttgtccccagtggacgtcaggatgtcctgactattgccattggacgactagagcaccacggttgtgtccgtactgctggagctggtgtgaccatcacacaatacttcggactggccccatcagcctctcgcaagtccaagtcatcaatggcccctgaagatttgtctcgactgaaagaaaacatcagggaagagctggagcagtcgatcactaagaaggtttccagcagttgatgatgtccttcagccagctgcaatcccaaatgcctactcagggagccatgtcgcctccagaagtccagacatgtctttatggtgttcgtgtcagcaccaagggaagctgtgtcgatccctccgataatgacctagacatcggtgcatttgataggcgtgggttgtatgtcgacgacaatcctccccacctggttgctattgttggaagactttatgaggggtcgacaatcttgcacagcatccctctgggcagtgatcaggtcaaggtgggtgttgaggaagttcgagatactgatgctcgcgtccctgtacccacttacgaggttcaattagttggtcaggcccttaacacctttcttgcttggccaacacatcttgtacaacctatttttaataaggtatttcaatttttccttctttcttgtcatttaacattcatttgtctcatataaagttaagacggtcgttgacttatgtttgttaactgtgtaggataaacagagacctcatgaaccggcgaaacctgtaaataagtcggaacatgttgaggatcccttgtaccagattgcattgatcgccctgaatcttttcttcagacagttgcaggtgccatgggacctggacatgttcggggtgcataatgacaagttcccattgtacatcaagcacgaggatatttctgagatcatccatggtggtcaatgtctgaacatctctgtcatacaattgtggattctgtgagtcactctccattacctaacgttacataacacattgttctatgttcatgcataattgactttatttataaaacaataggcatatgaatgagttatggctgcaatcggatcatcctgatgtgtatggattcatcgagccacagtccatacagagatctgggcaatctcaatttgaatccgaggactatctcaagaaatggatgcagagttcacataaagatgtctaccttgcagtgtacttgaatggataagtaaaaatgtacaaaacaatttaattaatgtaataagtttaataacttttttttctccaacgtagttcacattggcaactggtcgtcatatgtcctaaggccaatgttgtcgtgtggttctgttcgttgcacaacatgcctgataactacttgaaagcaattattagcaggtaggttgtaattttgtaacatattgctgttattatttctaacacatgaatatgttaattgtacaatatgcatgcatttttatcttaagcagtgctttgaaggcagtccatgacactgaaggaaataaatcaaaggctactgttaaatggattgcgcttaaagtaagttttttaataaatcatggttcatgtattgaaaataatatttattactatttacactaattttccgtttaactttgaacatgttattcaatttagtgtaataagcaaagaggaagcgctgagtgtggctattatgtcatgcattggatgtggacgatagtccaaggaggcttcagggacaactgggacatggtaattgtctaattgaaaatattttttttcacttgtttttgttttatactttttaatttatgttttattatgtcttgcaatatttcactgataaaagaccactcgaagcctagacattgaaggttgttagggttgaatggctaaattttatcttagagttagagatcaaatattaggttaggtggttaagagatttttaaacaattgtataaacattaggttagaaaatcattttatgtacattgacactattgaattttatttgttattcaaattttattttattgaattgtattatgaaattggttggttggtatgggtctggattttcatttacaagttgaagaactgcactaattaaaaaacagaaaaaatatttaaaaaaaaaaaaaaacaacatcgtttttcttatggaaactgatgttaacttatcatacaatatcgattttcattaaaagttgatgttgtattataagttaacatcgattttcataagaaaaccgatgtgcctatgtgtataacaacatcggtttccataagaaaatcgatgttgtagtgtaatcttttacatttttatgtttttatttgttacatatcgacatcgatttttaataaaaatcgatcttatacaatttcgttaacatcaattttgaaaactgatgttaacttctaaactttcaatgtctcctgattcaacatcagttcaaaaccgatattgaatgttaaaaataactaatattaaatgctatttttctagtagtggataaattaaattgtaccattataagttaggtaatccctctatacaaaagaaattaaattatctttgtgtggaattaaaccatgggatgatattgggttctattatttgaattgtttaaatcgatgtcgcaatcatgacgaaatatatgcatttcattttatttcatcaatatccttcttcttctttgccggcctttaatgtatgaaatcataatagaaccaatcattccataataccaatcatccctaaaagtttaaatagtttcctttaataatttttttcttgacttttgatcctttttttttatgccgtttactattacgttaactctgtctagtggttcctgaaatatttataaaaaagaactatctaagttttttttttttttttttcttatcacttggtatattttctcattgaaggtgatatataccaagttaacatagttaatataacgatatggaaatcgcacgtataagtctgagtatggtgccattatagagcaacgtcgcatattgatttttgatctaccaaactttaaaatttgtgtaattcgagacaaaaaaaaaataaaattgtagctcatatcgttgttacggttgcaattttcaatcctagttttttatttatactcctgattgtattgtagatcatattgttaagaaaataatataagtcgtcttcaataaaacagaaaatctagtaatgttgtaaatttcttttaagagaaaaggatatcgtatcgtaatttcagcaactgtaagaaaaagtttgaaaataatggagccagaaaggaaaattaaagttgaaaaatgattgccatattctaaagtatacgtccataccgctatcatattcccattcgtagaccctgggacaaaattgttttgtagttgatgcaaatactaatgagtaataataattatctaattggtaaaagttgttggaaaaatgttgataaaatattggcacttcctgaatacgtatgttgatacgtaccgctacataaataattaaatactatttgtaaatcctgaggcaaaacctgttttaatactaggtgtaaatactagttacttgttccactctaatattatcaaattggtaaaagttgtcaacttcggcctaacaaaagaagataattctacgtcaaatccaaaatgatttcttctggaaggagtttaactattggacgtaatgtattcatattgtaaaattaaaaagaaagcgcattttgattgggtaccaatttcgtgctcatcatcatgattgttaataactaacaatttgttgtatattgttctatcaattcactattctgttattggcttagctgacttgactagtgacaaatatcaaaactttatctcgttgtacgattctagtaattcaaattcataattattttattttataaatctgagtctttattttataaataagagtattttaaacttattttttaaatgatattatttttaagagttattttttatttttgtacttttcatggtccacaaattaacatagcaagtgatgtggtgctccaatatacatgttagctctccgcaatggcgaaggtaggaattttattgagagggagtaagcataaaaagattatatcataaataaaaatattccgaaaacaatataaatctaatataaaaaaaattattacaaaaattaaaatcacttcacttgatttttactctacgtgttttcatattgttaaaatcatctataattgaatctgtgttaaaactcaaaacaatttcttttttaatgtatgtaatcaaagaatcattaagaaattggtcttccattctatttcgaagtctgatcatgattatcttcatagctgagaaagatctttaagtagttgctgtagaaactggaagagtgagtacaagtctaatcactctatcaataagagggtaaatgatggactttccagttcttgctaacccttgacataattcagatgtagttgataaattaatcaaatctggatgtttaggaatatcaaactcaaaatattgtaactccatcttcaaatgcaatttttcctgttctgtgaaatctttagaataaaatttatcaacaagtttacaaatatcatcactattaaatgacttgtacttgtttcttggatctaaagtcatgctcaaagcaagtaattcaacagtattatcattgaacttgctatttaattcttgtaattgataatcaattgtagcacaaaaggtatttaccctataaaatttttcaatagaaaaatcatcttgttcatttcgagcacaacctctccttccaacatattttgcactcatatctgaaatgtcaatgtcatgttatatgcaaaattattgaacatgaaccaagaaagcatcccaacttgtctctcttaatttctgaagtaactcttttgtagttgaaaccaaatgtaaaccatttaaaatatcttgagactttcgttgcaaagcttgacaaaggacttcagtaatacccataatttccttcataaggtgcaaaatgatgacaaaatcaaaagatgtcaatgatgagtatgcattatctgcatctccacgatgtgatgctgtctttccttcattagaaatatttccaagaacttcacatatagttttaaatattttaaacaaattgcatattgaattgtaatgagaactccaacgagtagctccagctcgatgcaaagtaccaatctgattaagaccaactcctgattcgagttcatcgatagcaatcattcttgcaatttcacttgcttgggcaacctttaactcatcattacatttacaagaagaagtaacaatattaattatgaagtttaatttttcaaaaaattgatgaacatgttttacctcatgagatgcgacaaccaaggcaagttgaaggcgatgagctaagcaatggacataatatgcatatggacactcagcgcaaattaaagcctgcaatccattccattcaccttgcatattgctagctccatcatagccttgccctcgaatattttgaacatcaagattatggtgtcgaagagtgttggatattccatgtttcaaagtcttaacacttgtatcttccacatgtacaagaccaaaaaacctttcccgtataaaaccatttttatctacgaatctcaaaacaatagccatatgctcttttctagatacatcactagcttcatcaacaataagacaaaacttggcattggaaatttcttcccgtattgtgttcttaacctttgcagataaaacatgaagaatttccttgtgaatttgaggggaattatatgatgcattttgaggagcttttctaaaacaactgcttcaacttcttggttataggaagctaaaaactttaccatctcaagaaaattaccccggttaagtgaatctaagctttcatcatgacctctaaaagcacatccttgaagagcaagccatcttgtcacatccacagaaacttgtagtctcaaacgattagttgcaatctcttgagaagtaagtttttcaaccaatatctcaatatgttgagattggttcataagatcactacatgaactcacaacatttttatgcattgagataacattttccccaatatggcgtagaaaagcacaattttctccttcattaaccttttttccaatttctaaatccctcaacaacaaatgtattaagtccaaaacaaccactaccacatgttttactaaataaataacaaggcaaactgttgtcgcgattacgcaaatacgtttatacggcaagtgcaccgatcgtttaacaagtaataaaagtgtaagtagagtatcgtctccacagggattggaaagattttgcaataattgtaaaagttgtgattgaacaagaacagtaaaatacgcaagagtttgttggatgattgtattggattgagtaaagaatttaaacaaagcagtaaattaaaatcgaaagattaccaatgagaagtaattgtggtcaggcacaatcccttataagtatcacctccttcaattgactgatggctttatctttaagtttacataagacaagtctttcctaatttcgtaaatcctagactcttaagagcattaactagcgatttcaccctttaattcgatcgagaaccctaaccttctagcgattctgtcaaactaagaggtcaaagaacaaatcttatgggttcgtgttatgtttattcggagaataagtctttcttattgtagctaattcctaatgccttagtgaattaaccctttgaactgatttcataacctaatgtcttagtgaaactagtcaattcaagtaatcaaagaacatattatacctccgcactcatgcatccctatgtctaggtgaagaacaagtgtcaatcttaacaggtcagatattataattccaacgtgtccattgcgaagtataactctcaatacccattcagagtgatcaattctaaacaagattatgattaagcacagaaaagaattgaaataaacaaaacatatgcatttaataccagtcaatttacagagagaaaactcataagttcatggcctttccacaacaagatgattagctagccataggcctcaagaataccaaagcgattggatgaaacatgattctgcagaattggcttcaatcttgattcctagggtttgccttcaataataatactctattctcagtgtgtaaatatctaattgtgtgtaattgtgtctccttccccttaaaactccaaaaactctactatttaacgaatgttttaattacagtaacttctcccaagctttttcctattttcgaagcaaatatcttctaattcaggcaggaaaaacagattcacgcgactcgcgcgcgacaccacgcgactcgcgtgacatggcagtagagaatggcgcgaggcgcgtggtagctgaagtggctcgcgtgggttagcagagttgaattgcttattccttgaagtattcacgcgactcacgtgagttcccaagtatgtcgcgtggaaggtcagagctaaattggcttatcttggagtttgtcacgcgactcacgtgaaacatggcgcgtgtcgcgtgatagtttctggacaaccaagtggatcgcgtggatttggcgcgatgcgcgtgagatggcagctcttgttttcttctttatttgctcttaatttcccttgttttggcctgcaaacacttaattggtattaaaatgctttctataacataatatactaaatattcctaattcttatactattttctaactatttactctaaatatgacctaaactaatgctatatttaagatgtgtttgcaacacatcaaacaattcctagatttgaaagttgctgtcctcagcaatagaaagagttctaagacataagcaagaatcaacaatcaacaaaaaccacaattttcaatcataaaattatcatgaatgtataatctactcagttaaatcctccatgatactttccttgctatcaatataagaactacttgagtttacctcacggatggtgtttataatcactcatttcactcaagtgtttcaggttgtaattaccttcttactcaacatgattaaagcattaccataagcttgaagatattctcattagttacaatcatgacttgatcagaaggtcttttaaagcttgtaatgtggcttggctaagggtatgaattatttgggaaaaatagttcaatacgaggctaagtctagttccccaagtccaagcatactttggtctttcaagcttctttgtctttctttcttcaaactggtatttttattcaaaataaaatcatactactttctttttactttttcacatttttcttatccaacattttgtaatcagaacatgctaaatatttttgcagctttttgaactttttttcagctgagcatttcaactttttcttttcattcatttgatttctcttctccttcttcttcattgcttgatcaatagtacttttctgacatggacttagttcaccttcttaagcctcaaaaggtttagtcattttggtcatggcttaaattttgggttattgaaatgaaaggcttaggctcaactttaggttcaaaggaaaattctattcaggtaggttaatttggccctagttttcagaacaaatcatgccttaatcatttcaagtcacacctgcacttagagaaacaaatcaagttctagaataccataaaacatggagtctctcaaaagaaaatttaccgacatttggctcaagaccttacaggtgctgtgactcaagtcgttctcaatcgactgcatatctggcatcatttcaacattcaacatgagtttcaaatactatcaatcaaattctactcatgcatcatgcagtccatgtctcttatttcatccactcaactcagagaaatccgtctattaatgattttattcgctttcttaatctgaaaaagttgtgtgctgcttatttttaattgtttgaaaaattctgattatatgaaaaattttcaaaaattctgttagacttctttgattcttgattgtgatttgcgaaataatgcgtaactattctcagatttatatgttgctgtccccagcaaccacaaacttggtcatagcgctttggaaaaatttaagcattattcggaaaatcgcattcaattctcgatcgtcaaaacagattagataagaaaaattataaactataaactgtactataatatgatgcagtaatgtcaaagtgtgagtactaaaaatgtcgatgaaatgtaaatgtgcagaagaataaaatgtatgtaaaatgcataatattaaaaataacaacccaaacataaatctgaaaataaaagaatcataaaataaaagtcctgctcaatcatgagggtctctgtcctctgcagccatctctgtatgcgcggaaactaatggctgtgtcactgcggtgtctgcgtccgaggccagatcaagggaatcagtggctgcaggaacgggctgagagggctgtggtgggtgtgtaggaaccgaggtctgatactccgacgggtcaatgcccagatgctggcaaacagctccccacatgcgtgtctgtagagccaactgctcactctggaactctagctgggtcctcacaaactgctggaagtcaataaagctttgggagtcctcgtaaagtggggtgtgagtgggaactgtggatggcggaggcatagaagtacgtggtggtgaagtgggtatggaagtctgtggtggggatgatggtgaagtccatggagtgggggagactggtggtgtaggagctggctggtcatgctgggggtcccctgcaggaaagtctcgaggagaagcagcggcaatggcctcaggtgtgagcttagaagctctaaccacctgctcatctgctgccgcgctcatagcggtcgtataagtcctataagtcatgagcggcgctatcgggacatccatgtcctcatcctcgtcgatatgtaccccagcgtgccggcaaagaagtaaaatgagtgaagagtgaccaatccaggaccgcgtgccgacgtcctgtatcatctgtagaatccgatcagataagactgaagaaatcatgaggttacctgccccacggagaatatagaggagaatggctcgctcgacattcacatcggtcaagtttcgggatggcatgaccgtgtggttaacaaataagtgccaaaaggcggcgtctccaaccagctcggacttcttcaatttgtctggtatgtaatccatgctgggcttggtctgccaagctgaatataaactggtaatagcatggcggatggtggtggctaactctgggacatcatcgttatacatcttcgtcaccgcatctggctgcatgtgccaaaataatcggatgaagtcgcatgcggcgaatggatcgtaatcggtgtcaagcagagcctcaatggtcttctccccatatggtacttgaactcctctcacccacgaagtcctggtgcgataaactgtgtcctgatccacattggagagaaactccttgaggatcatgctgctgctgggctctgggaaagagacaagtctctgccacctgcgtcggactatgacctgtctgataggatggtcctcagggaactcctcccacatgaccttccgctccctgataatattcttgggtaaataccaagaatcaaacttggcctggcactctgcagtgcggaagtggagctcatcaaaatcagtcaccctagcccttttcttactgctgctctcccctgcggttttcttccttttgggttgttccacctgtttaccctgcaaaattttcaacaatatatatatatattaaaaacaatggggtattcccagatttaggctttaatcaaacctaatttaataaggtactcttttaatctcactcatttagattcctgcacttgacaattgcataaacaggtctagattaaaacggataatcaaacatatcacaataatggttaattcgaatctagacctctgccccacaattcccagatttagctttaacaatggttgacttaagttgggttataatggaatatcaatgcataattcaaactatatccaagaacagtgattatgtttagcatggacattatgtgtacatttaagtcaatctcagtcactcacatacctaattcatatagccaggcataaatatagttaggattctaacacatttaattacaatatgatatgcgcattagggagtattataaccattttactatagtgaggatatagcaagtgctccctttgagtgcgatttcccatatcatcaagccttatccgaaattgggctttaaattctatgttatgtatcaaattaaccctcccaaatttcattctttattgcaaggcatatacatcattacagttccatttcaattcaattcatgtaaacattcacatcgaaccagttatgtatatatgtatgtggttcatgtgtgtattaaatcaactaaatcttacttaatctatgcttatgcatttccatattttataaacttgcttctttcaagcatgcttctagtcaatcaattggtacatgcttatcaaaattataaaccagactaggtattatattgcgctcaaattattcaggcttattgaatcaatcctaggtttaaagagttcatttaggtgtctattgcattaaattctcattcaggccttttatcaaacatgtggtgtgcaggaagaagaatgcatgtaatatgtgtgtggggcatatgtcaaaatccaaaaattttccatagaattcagaccacagacaaaagaagtagaagaaggtattcattttatatcaaaaatttacaatggggctatcctagagttgagtcttaccttgtctttggccatggttcaatggaagaagataaatgcagagaatatgcacaagcaaaatgaatgcaaagacgtatggatgagaggcaatgtggggtttttaaggtgtgagggtaacaagaggtagttaatgtaggttaatgggggttgagggagttcaggagaggagttaggagttgggcgagagtgacggagaggaatgggagtgaaggggcgcgactttggggtcttattttaaaactgattccgcgcattcacgcgactcgcgcgatatatcacgtatgtcgcgccatgtcccagtaaggttcaagtgagtcgcgtgactttccacgcgactcgcgtggaattggtcgttttgatactggatattcacgcgatccacttggtattccatgcgtgtcgcgtggaatggcctgattgcctcttgagtttctaactatgacgcgtgtcgcgccatttaccacgtatgtcgcgtgggataaagtattttgacactgctttatggcgcgacccatttgagtttcacgcgtgatacgtgaatagacagtaagtatagcgcgtgtcgcgcgacatgtcacgcgactcgcgtgactccccttttctgaatccctagtttttctcctgctctttccaagtttctcaccttataacaactactcccaattgaaagaacttaactaatactatttacttatttagacaaaattgaaatgacttaaagtaaaataagatgcataaacttaaattgcatgaattgaaatttaatactatcaactgaacttaaacttatatacaatttccatgcttgtttaaggtccttaagctagacttttacgtcaattcattcaatgttagcttgaagtggtacagagtttgagtttctgtccaccttacctccaaagtaaagtttcagcctatatccatttaccttaaacactttatcactatttaaggctgaaattgctatcgtaccatagggaaaaacttctcttaccagaaatggcccagaccatcgtgactttagtttacccggaaaaagttttaatcgggagttgtagagcagcccttgttggcctggaatgaattccttgtgtctaatgtggttgtcgtgccactttttagtcttttccttgtaaatgcgggcattctcataagctttcaacttgaactcatctaactcattcagctgtaacaatctcttttcattagctttggttagttcaaaatttaagaattttgttgcccacaaagctttgtgttcaagttcaagtggtagatgacaagacttaccatagagcaattgaaagggggacataccaattggagttttgaatgcggttctatacgcccacaaagcatcatccaatttcttggaccaatctttccttgatgttccaatggttttctctagaattcgcttcagttcacggttggatatctcaacttggccactggtttgaggatgatatggggttgctactttgtgcttcactccatacttggctaacaagctctcaagatgcttgttacagaaatgtgttcctccgtcacttattatggctcttggtacaccaaatcttgtgaaaatgtattttctcagaaagtttataaccactttagcatcattggttgttaatgcatttgcctcaacccatttagagacataatccacagcaactaggatatattggttaccaaatgatttagggaatggccccatgaagtcgataccccatacgtcgaatagttctacttcttgtatgttgttcaagggcatttcatctcttcgcgacacgttcccagttctttggcaattatcacattgttgtacaaaatcctttgcatctttgaatatagttggccaatagtagccacactgtaggatcttttgtgctgtccggttaacaccgaaatgtcctccgtagtttgatgaatggcagtgccaaaggatatttggcacttcactttcaggtacacacctacgtataatattgtcagcacaattaaaatataagtatggattatcccaaagatacctattagaatcactcagaaacttcttcctttgctgccaagtgaatgcttcaggtatgatttttgcagccttaaagtttgccatctcagcaaaccatggagtaactccaacagcaaataattgttcatccggaaagacttcgtttatttttagctctggtccatcctgcagtttgttgtgttgaattcgggatagatggtctgcaactttgttctccactcccgctttatctctaatctccaaatcaaattcctgcaagagtaacatccatcgcaataaccgaggttttgcgtcttgtttatgcagtaaaaatttaagagctgcatggtcagtgtaaatgattactttagatcctaccaaataagacctaaacttatctaaagcataaactacagctagcatttctttttcagtggttgcatagttaacttgtgcctcattaagaactttactagcataatagataacatgcaatttcttctcttttctttgtcctaaaacagcacctactgcataatcactagcatcacacattaattcaaaaggcaagttccaatccagagctgttataacaggtgcagtggttagcttttgtttcaaaacattaaatgcattaagacatgcatcattgaacacaaactctgcatctttttccagcaattgactcaatggttttgcaattttggagaagtctttaatgaaccgacgatagaatcctgcatggccaagaaaactacgaacaccattaacattaataggaggaggtaatttctcaataagtaagagtttagctctatctacctctaatcccatttcagaaattttgtgtccaagtactataccttctctaaccataaaatggcatttttcccagtttaaaaccaaattagtttcttggcatctttttaacactttagttaaattaagtagacatgtatcaaaacaaggtccaaaaacagaaaagtcgtccataaatacctctaagcctcgttctaccatgtctgaaaaaatggaaagcatgcacctttggaaagtggcgggtgcattgcacaacccaaatggcatcctccgataggcacatactccgaatggacaagtaaatgcggtcttttcttggtcctccggtgcgactggaatttggttatatccagaataaccgtctaggaaacaataatagttatgaccggctaagcgttccagcatttggtccatgaatggaagtggaaaatggtctttacgcgttgcatcattaagccttcggtagtctacacacattctccagcccgtgattgtcctagatggaatcagttcgtttttttcattttgtattactgtcatcccacctttcttagggacaacttggactggacttacccatggtgtgtcagaaattggataaatcatacttgcatccaaaagcttgacgacttcctttcttaccacttctttcattacaggattaagccttctttggggttgtctcacaggtttaacgtcagtaaccattaaaattttatgagtgcaaaaggaaggatttatacctttaaggtctgaaatagaccagccaatagcggacttgtgttccttgagcactttaatcagcttgacttcttcatgccaatctaagcctttgttgatgattactggataagcctcttgttctccaaggaagacgtatttcaaatgttccggtaactctttcagttcaaccttgggtgctctggaaagaatgtcatcttccttcacttccagctcttctattttcaggtctgctggtattgtttcagcattgttggaatcagttaccgcatttttttctaattccactgcatatgtggtttctaatttctctgctgcagaattttttgcataaatctctgcagttgtagattccaaatcctgcatctgtgtttgtgttagtgctggtagtttttctgcatgatccgtatgtgtagtgttggttgcctcatgtgctgaatcttcttcatgaagagctgcaacatttgtttcaaaacctgcacaaataacatcatccaatacatctatacgaaaacaatcatgctcatcgttagggtgtttcattgcatcaaatacactaaaaaccacagactcattatctaatctcagctctaatttgccttgctcaacatctatcaaggctctagccgtggctaggaaagatcttcctaaaagtagggggatttcactttccccttccatgtcaagcacaataaagtctgcaggaaatataaacttatccacctttactagaacatcttctattaccccggagggtgtccttaaagacctatctgctaattgcaaagatactctagttgatttaagttcagttatgcctagggatttacacatggataatggcattagatttatgctagcccctaagtcacataatgcttttcctacatcaatattaccaatagcaataggaatattaaaactccctggatctctcaacttgggaggaagcttccgttgaatgattgcgctgcactcctccgttaatgctattgtttcacactcctttagtttcttcttgttggataggagttccttcatgaatttcgcatagttaggcatgttagctaatgcctcagcgaatggtatgttgatatgcagcttcttgaacatctccaagaatcttagaaattgacgcttctgctcttgttgcttggttaagataggatatgggggtttttcaaagcgtgaaaaatcccacttctttggtggttgcatcggatctttttcttctgaattttctgtaactttttccttatttttttcaactgctgcagaatttttctccacctctggaacatgtgattcgggcttctccggggttactaatactttaccgcttctggttgtgattgctttggcatgttctcttggattcccaaccgtatcacttggaaattggccctgtggtctttcagccatttgtttcgcaagttggctaatttggttttccaaattcctgatagaagcatcttgattggtccggtgagctctcgtttcagctataaactccgtggtggtcttagttagttgtatcacagctttttctaactcagatggttctttattcggaataggagggggctgcaagtaattgttggacttgtaatccaaaccacctccttgaaatcttctaggataattgtttccagctgcataattgttcctttggtatggttgctgctggtatagttgttgttgttgcctttgatcgttccacacgccatttacctgcacagggtcagcaccaattaaaataggacaagtattagactcatgctcaccttggcaatattcacacacaacatatggtttgcttgtgcccacttgtgctgcagaaaattgcaatcgatccatcttctcacttaatttggctaattgctgcgctagaatcttttgctctgcaagcattgcatcattggtatttaattggatgggttctctctttggctgcattgtatggctttcattctcagttcttgccaaagatttgattaactcatatgtttgtgcggcggttttagatcttatagtaccaccggctgcaacattcaccatcatccttgtctcgggagtcatgccattgaaaaatattctgacctgtttacctacaggcatatcatattgagggcatctccttactagtgcttggaatctcttccacgcggtgcatagagtttctcttccactttgagtaaagttggtgatctcgttcaccaatctattgtatttgtccatagagaaatactctgcaaaaaatcttgaaaccaagtcatcccaagttgctatactgttagatgtttggcagttcaaccatctcaaagcgttgtctttcacagcaaacgggaataagcttagcctcacagcatcatcggaaactccctggtgtctaatagtgtcacagattctaaggaatctatctatgaaatcatgagggtcttccgaatcatcgcctccaaactgactacgctccaccaatgatatcaaggaagggtttatatcaaaatggtttgcttggattggtggtctcacaatactggagtttggtcttgtgaacataggagccagaatatcctccataagttcatcttcaggccgtaaccttggtgggggctgattacgtagttcttcagccatctcttccgactcaaattcaggaattgaatcaaagtcaaagaattccgcttctcttcttctttgtctagctagtctccttcggagtgttctttcaatttcagggtcgaattccaattcctcagagttagctgatcttcgcataaaaactcaaaagaagtggttagtagcaaaagttcaatcacaaaatttaaattattgaaaattctgttaccaatccccggcaacggcgccaaaaacttgttgtcgcgattacgcaaatacgtttatacggcaagtgcaccgatcgtttaacaagtaataaaagtgtaagtagagtatcgtctccacagggattggaaagattttgcaataattgtaaaagttgtgattgaacaagaacagtaaaatacgcaagagtttgttggatgattgtattggattgagtaaagaatttaaacaaagcagtaaattaaaatcgaaagattaccaatgagaagtaattgtggtcaggcacaatcccttataagtatcacctccttcaattgactgatggctttatctttaagtttacataagacaagtctttcctaatttcgtaaatcctagactcttaagagcattaactagcgatttcaccctttaattcgatcgagaaccctaaccttctagcgattctgtcaaactaagaggtcaaagaacaaatcttatgggttcgtgttatgtttattcggagaataagtctttcttattgtagctaattcctaatgccttagtgaattaaccctttgaactgatttcataacctaatgtcttagtgaaactagtcaattcaagtaatcaaagaacatattatacctccgcactcatgcatccctatgtctaggtgaagaacaagtgtcaatcttaacaggtcagatattataattccaacgtgtccattgcgaagtataactctcaatacccattcagagtgatcaattctaaacaagattatgattaagcacagaaaagaattgaaataaacaaaacatatgcatttaataccagtcaatttacagagagaaaactcataagttcatggcctttccacaacaagaagattagctagccataggcctcaagaataccaaagcgattggatgaaacatgattctgcagaattggcttcaatcttgattcctagggtttgccttcaataataatactctattctcagtgtgtaaatatctaattgtgtgtaattgtgtctccttccccttaaaactccaaaaactctactatttaacgaatgttttaattacagtaacttctcccaagctttttcctattttcgaagcaaatatcttctaattcaggcaggaaaaacagattcacgcgactcgcgcgcgacaccacgcgactcgcgtgacatggcagtagagaatggcgcgaggcgcgtggtagctgaagtggctcgcgtgggttagcagagttgaattgcttattccttgaagtattcacgcgactcacgtgagttcccaagtatgtcgcgtggaaggtcagagctaaattggcttatcttggagtttgtcacgcgactcacgtgaaacatggcgcgtgtcgcgtgatagtttctggacaaccaagtggatcgcgtggatttggcgcgatgcgcgtgagatggtagctcttgttatcttctttatttgctcttaatttcccttgttttggcctgcaaacacttaactggtattaaaatgctttctataacataatatactaaatatgcctaattcttatactattttctaactatttactctaaatatgacctaaactaatgctatatttaagatgtgtttgcaacacatcacaaacaaaatgcaacatcttttcttggagaatactctaaccaagatggaaacaaatcaaaccaagaagagaaaaaataacgttgattattctctagcccagaaaaaggataattttgaagcttacactgaaatggaccaaatttaagattaacacgacgaattccatcttgttgatttacaggatatttccatattggagggtatagtgcaggatctctttccaataaagcaagatcaacttctttaactacctctttattttcaattctaggagactttgaagaaggagtctcagtattcaacaattcaacattaggagtagacaatgacaaagactcactattttttctcttaaaataagcatcaatggtagtagcactcttcacaataatttttttgcacgtcaatcacaaacaatatcaagtatcaatgacaattgcgtaaagtaaatcactgtttcattttgaatgagatgcacacaacacattacacaacattaacaaccaaagcagtagtttatttattttttatttcgtttcagatttaacaaaaacgggttcagcccaacatggtagggggtgtaaaaacaaggggcacaaatagtagtttattttattttagaagaataacaataagaagaagaaagagaaaaagggggaaaaagaaaggaacgaggggatacctgaaactcttctctttcataggtttaccaaatgaaacaacttttttgactccttctgttctcttgagatttgtgtttcctttttctcctttgtgtccagacctcttccatttatagcgttctttctccctcttcctctttattcttttcctttttattattattttttttgttttatcatcttccttttctttttttctttttctattatctctctttcccattttatttttattacattttctttccttttttatatattttttctcttttatgttttctttcctttttattttttaatgttttttctttttcttttctttttttactacgttttctttatatttttttctttccctttttacctttttttaatattttttccaatgttatcaaaaccgggttggtcattgaaccgatcgaggtagtgggtcagtggtccaaccggtgggtcagtaattgaatcggtttggcccgatctatattaaaaattcaaattttatataagtatataaataaaactaacattatttgattaaaaaaattcattcatactttaaaatccaaatttccaaaataacaattgaaatgttaaagttgatatcacaagtccacaaatattaataagtcttgaaatggaaacacaaatattaaagttaataccacaagtccacagatattaataagtcttgaaatgaaaacacaaatattaaagcttagcctaataccacaagtccacaaatattaataagtcttgaaatgaaaaaacaaataacatcaagccatcaacatgacaacatccataaatcataagttatatccaaggagccaatggagggtcaagttcaggtaacccttcttcatcacaagaatgaggctcttcaccaatattgctttcatttggattaacatcttccatggtgttgtcgggtagttgtggcactggcacatcatcatcctcatcttcatccagatttaatttatctatgacaacatcgttatagataggggtgggcatggattggatttttaagaatccaatccatatgcaatttatatctatttaaatggattggatattaaatccatatccatatttttttaaaaacaatttagatttaagatccaatccatttaaatggatatggatttggatatatccaattcatatccacttaaatgttataagattattttttttttacaaattttagttattaaatgctaaaaagtgaaaatttagtacctgtccatttaagagttattttcaaccaaccttggtcaagactatttttttatcgatattggttagtgtatttttagcatacctcaaccaaagtaatttcaacatatatcggtctagacatttttagaccgacatcaacgcattttttggtcgacattgactaagggtttttcgatcaacatcaattatgactaatttttggccgacattggttaggatttttgtggctaacattgacaagattttttttttgttgccgatgtcgatcattgatttttttgccaacattagtcatgacttttttttggtcgacgttaactagattttttttgctgatgttggtttaaactatatttttgttggcaacaacaaggatttgttggtcaacattaaccacgactatttcttttggccgacgttagctagggttattttttgttgacatcaagtaggattttttcgaccggcgtcaattgaaaaaatattttggccgacgtcaactagtttttttacctgatgtcagccgatgattttttcaaccaatgtcggccaaaaaatagtctcgtctgacgtcaacaaaaaaaaaaccatagtcaacgtcgagcgaaaaacctacttgatgtcgataaaaaataatcttgacagacatcaacaaaaaaatagcatcgactgatgtcggccaaaaaatagtttcaatcaatgctgactaaaaaaccttacccgcattaactgaaaaataagctcaacgatgacagcttaaaatcatcaatagttgacaccgaccaaaaaaatagtctcaatcaaagttggcaaaaaaaaaaaatagatttaaaaatccaaacaaatatccaatccatatccatttcatatccaattaattggattggatttaaaatccaaaaaaatggatatggatatgaaactaatccatttaaatggatttaaaacggattagattagattggatataaattattttatggatatggatttttttgcccagccctagttatagattcaaattagcaattaaaataagtacataacataagtgttacctaataaatactaatgttattaagaaacaataccaatatcatctaatgttggttggatggacatatttgcaagattattacataaagcttccaactcttcacgagttaagaatggtggtgactcctacgacacccaatcagaatggtcatcaagggtttccaaattgattgggtcataattttgttgccttagacgattcctaaataaattgatcaaaatgctcatatatcaataatgaaaaaatcaaccaaaataggtaaacaatcaaagtataattagtataatgatacctttgttgtaacctcaagttataacgaacataaacaaggtcattaagtttttgatgctctagcctattcctttttttttgaatggatgtgctcaaatacactccaatttctttcacaactcgaagcactaaaagtttggcttaaaacacaaatagccaatttttgcaactctagagcattacatccataacaatcccaccattgatatagaattaaacatataaataaataaatcaaatatatgcaatgaatatatttaggaagctaaaataaatcacaaaccaataatgtatataagagtatgaaacactaaatttacttggcatgactgtgttttgttcacgtattgcagctcgtcttgcaaaatctccttcagaatttttatatatcctcatgccttcatttaaccaataaccagctgcatgtagatctttccaaagctgtgaatcccaacgcctatcaaggacctccaaggctctactttcctcctatttctcttaaacctcctaaccatctcctctttggccttatacatagcctggtaaagaaaacccatggcaggtttatcttcactgtcaacaatacttaacacacacgaactaatggctctgtaagcttcacaatatcagcacactctttccaaaaaccagagtccaagatttgttccacaaatcttttatcctttgagtctttggcataagttgaggttgtccagtccctagatgtcaccatatcccttaaagaatccttctgggccaatatgctttgcaagacaataaaattagttgcaaatcgagttggagctggacggagtatatctcttccacatgtatgttgtctcatcaagaataatgcattacaatgattatatatgtacttagtaattttggaggcatgtgaaacaatgtcactcacctcctcaaatttaccaaagtcctacaacatcaaattgatgcaatgagcagcacaaggagacaaatataatctaggaaactctttctaataacctactagtagcaacataatttgcatcattatcggtcacaatgtgaacaacattttctgctccaacatatagcaccatctccttgaaaagcttgaacaacatttcagcagtttagaaagcataggaagcatcaactgaccttaagaaaacagtccctttaggacaataaacatgaaaattaatgagagttctcctacaacggtcagtccatccatcaaccatcaatgtacatccagtttccttccaaatttcatcaacaagctttttcacttcatcaacctacatatttaacaaaggaccatgaattctataaaaatttgggcctttataccctgcactcatgctactaagagcatcaatcataggttgataatatgtcgacttaactacattaaatggcattgaagcatcaatcatccattttgcaatggctttgtcacacttttctacaatttgcttcttttgcaagacactcttcaagctaggtttagatccaggagttgttctaggcataaaataatcatttacattatgagtgtttttccctttttgagacttggaagaaactgattttggagttccacattgcacagggtcttcatccattgcaaatgtatcactattagttgattgttcctgcacttttcttttcttgtttgtgtaacaccccggacgtctccggcatgttatcatcaatgatatacataacacgctattagcgtttagtaagcgcggtgcggaagcgatagaatcgtttatcttgattacattatgcatgaaatataaaaccacacacagaaacctaaaacaagcctctgctgatccagatcaaacataaacaattatataggtagatgacataaaacataactcagataatcaggaggaaacacacttatatacaatcatcatcatctgtacatatacatgctcaaaaacaagaccacagctgggtcatacattataatatgtacaggaaatgggtatacacataccctacaactacacagagattctaagaccagcttctattcttgaagctctgctttggtcttctactgcagcctcccatccagcctctcaggttcactagggcctcctgccctgaggtcgctcctctcctcaagaagcacctgaaaaccacaaaccccacacagggtgagacaaacgtctcagtaaactcagggttctgggaatcctccctaaccctggtttaccatcaagcgtaaacaaaacatataacagagctgaggaaaatcctcctagctcacacatacaaagactaggacaacatcctagctttcacacatcccagctctctgggtcataaacggatgctctcagcatcagaggtattcaacctcgtcctggctctctcagccatatcacagagaacaaagccataaccatggcatcaatatctcatctaggctctcatagcctggctcacagacatctcacagagatacctatcatcgtgtctctcattagacacttctcaacacaagagaggcaccgcctctgaaccacacaaacattgcctgaggagaaccctcaactcaggactctgaatcatgcaaacatggcctgaggagaaccctcaactcaggactctgtaaatccagatatggctcatctaagaggccttaggctctagtccccctcgggaagtcctctcttagagatacaacatatctgtctagcatctggcctgggaaatagccgtccaggacttcacaacacatgcctgggcaagaacatccatatagggcaatctcctccaggactttcataaacactggcctgaggttaaccactcaggactttcaacatctgtgcctaaggaggaacatccacacagttccatctgtccttaggtcttaagtggagagcagtggcacctcccaaggaatctcagctattccagggagtcctcaaactctacctctggctagggaacctcaactagcctgatactcatccagtatcctctaggttccatcacagaccatctcatgatctgcatgtcctcaaaaggcacacggcctcacacctgccatgtcaggtgtctcataaccctcacactgtcatagtgtctatcctagggttcatctttctagaatggtctgagttacactccaagacctgctcatagagcctctcaactcatcatcagatatatacaatatcagaggccaccttggccatttctcatacgcatggcatgcacacacacacacacacacatatatatatatatatatatatatatatcaacaaaacatgccagcttcaccttacttgggtgataaaccaaaataagggaaaaccccagaacgatgagcttacctggctagccgtgcctcttagctctagcctccactgatggtctgctcctctgacaccctctgtgtcaagccctaccaaggcacacaaacacacatcacagaccattcaagcatataaacatgcataagctcatcaagcaaacatccactgcctcagagaaggaaacctcagtcccttctttcacccaagtcatctgcctaaggttcatcaggctcatctatcacaagcctttccatagaccctcagtggtctatcacagatcaaacatggcctcagagtcattacagactcatccacaagccattctcagagagctcaaagctctaacaaccccaaacctctgggtttctcagggcttggacggtctatctcaccagacactgtctccatggcctatcaggcacctcaagcccatcacaaaggctctggcatgtctgaaatcaagtgactcagtccaagtcacacatgcctcacctagagccaaaaccaacagtctccaaatcacaaactgaaagctaatccttcctcctctcatcattctaaacacttctcccaactggacctagagctaattctagccctatcacagatgggtcactattcacccaaaacccccaaatccaaaatcaatcggagaaactcgagtttcttacctcaaaactgctgaggaaggcctctaggctactctccctagccttggtgcagctgaaccaccgcctttcctcgccaaactcgagctttcatccacctctctggaggttcctcagaaactggaggttttggtgaaagggaggaaggattctcgctctcactcggtttctaggtgatagaaagggctcaggaggtgtttaggctctcaaacatggccctaaaaagcttggaagcacctccaatggaggtttggaggcaagaggaagaagaaaggctcttttccccctccattttcgcgttttggcctttaaattctggttctgccgacgttcccacgctactcgcgccgcacttcacgctacccacttgggttggcagaagaaaataccatttctaagccacttcccacgctactcgcgccgtacttcacgctacccacttggacatccacgctacccacttggacatccacgctacccacttgggatggcagacagcattggtatatttatacatatggcgcgggtcgcgccgcacttcacgtgggtcgcgccgcaggccagaaaagcctatttccactctttctcaagcgtttaagcctctttccaagggattccaaggcctaattatatttcctccatcataaggttaatcctaagattaacacgtgcttactcatatgtttaaaaattccagatattacagtttgtttcaatctgttcaagtaatagcttcatttgatgttggacatcagcaagaaccttcttgcaagcctctatttggcccttttgtccaactaagtgagccttaaacctattaataccacctcccttaactcgtttatcacaatatatacacatgattgtcaatttcgaaccaccctcattaatttgattacaatgtccccaagctagatggatcaattttccctctaacattctcaggaatatttggagtagacgtttcttgagatgatgagacttcagtctcttccatcttgaggtctaaatgcaaaaacatcaaatgacaattaagtaattaaccaattaactctaattaagcagtgagtaatactcactaagtaaacaaatttgcctaaagttatcatacgtttttttccagcaaaaaaagcacattatatatgactacaataaaattaaataataaataccccaaccctttattaaataatccttttcagttttcacaaactaacccttcatttttccttgtagtcctactaacattttcattccaaaacataataaaaagaaaaagaaaagatcttcatcttacaagatagccgtgtccaagatccaattaatcataaaaaaatgataaataaaaagtaatgactaatgaatcttaaaacatatggacaagcaggattgtttaaatttcccccctgatccagtttgttattcatcttgcaagatagcccagcagtcctacacttctactacattaaatcaatgtaaaacctatacacaaaccgcacacattaagggtacttagtactcagtaatcactgcttaatttactttggactttgaaaacaaatagtggcaacaggtaaggttcccctttcagcaaaataacatatgaatgaggacaacaaagttctatataacatcaattattaatatttcttgttcctgaattccatgtcacattatcagtatataacacagcatttgtaagcattggatgctcaatcatggaaagcaattatctcttcaaggaaatttatctaagcaataaacaaaatatctctgcaacaaggaaaataaaaggataagatattttttaaaaccaaagttcccttgctagttgttagtgatgtagattaaatacatacaataagaacattttgaatcaatagtactatactactacttcataatgatcgaaactgcctaatattcaggggggcacattgaactagaacataaattttgattaagaaacgaaatttgtctgcacataaggcttcgtggggatgtgaatgtgatgatccctttcaaaatcttgtgtatgtgcaattgtatgaacgaacacggcctcccaagtcccaaatccaagctatggtaagtaaaatgcactcaaagtctcaaacatggccaataagcagagcaattaaaaatgaggctactgtaattttaaattatacagaaatacaactatacaagacaatgaatgtgaagcacgaacacggcggagacaaaagaaaaatagaatacaaaaccatattaagaagcattcatacaagatacaacactaccacagagtagaggagacaatgatgatggagatgccacagaggaccccgagctctgatgacaccacagacagagatggccccaagctcaagctgtgacgctagtgacaaagatgcgtgccctgatgcgatgagccgtgccgtgagcgtgaggctgagaagctaagttagtgaggctgaggagctgagcagaggcatgaacggatgaatgaagaatcaatgaagcgaatgaagtgaacgaagatctggaaaattttttagggcacaaaaatgacgccattttgcacgtctactttttactttatttttacttcaacccggtccgggtcataaaacccagccgggtttcggtttaacccaatctaggccgattcaattgcacgtccgattcttgagcaacttgactcggttacttgttttgttcccggttggaccggtccaacaggtcggtccgaaccagttttgatatcattgattttttctttcctcttttttttctttcatttttatttttcttattaatttttttaggggggcggtagtccaccctagccccctagttccacctctggctctccacatcagtcctggcataggagcatggacacaccgtccttcgtagtcgagctactggactgacaagttaataataaatgccttaatatttgaatattaatgatgacgttatgactcctttatcaagttgcaggtacttaattatctataagctacgatttatctactagctattatctacaagctagaaattatctacaagagttgttacaccactgtaactgctcctacgatcaaggacctgaagctcctatcccatgctataaatatcaagttctattccacctttttcaattcattctcaactcactcaagtacttacttgagcattagagtcctttattttgtgggtccctcctttgttctcccagtgaagggtacttgtagttcgatgtgtgaggtcatggagcccactttggctgctggctacgtcgaccctaacatcggtcagcgccagatttcagtaagcacatctggcgccaccgtggggccgcgataaaactttccctatggcctctcttcactaatagttagcaaacggtctggcctcagacgcgagccacccctagacagctccaacccttcccaccaaccatgacaaataacgacactcttcaataaccacaaacccacattgtggagatggagtgacatcacgaggaggaactcatgaaactgaaggtcgaccataatgaactggaggctcgtgtgcgatgtccccaaggggacgagcaccccgcccccatgatccacgaacgtactcaagaggaataacaccctcgacagaccatcaacacccaagacgatcccaacctctcgtacatacaccgccataaacagcggacgactcgtcgacacctttttgtcaactgtatcatggaggtcgagttgcctttaggatggaaatatctcaacctagagcgctacaatggaactacatatccaaatgaacatttggatgcatccttatccaagctaatctctacaccaacaacgacatagtcttatgtcgagttttcccaacgtccctcaaaggggcaacattgacatggtacggaggactccctccatggtcaatcaacggctttgacacccttgtccagcagtatgcaaccagtaggtcacaccgcatggcttctctggctctagccagcttgttgcaggcagatgatgaataacgccgtaaattcatggaaaggttcagaagaattgttgtccaaatcaggaatcttaatcctaaagtagcactacactccatgttgctcgcctaacgacctggtaaattcttaggcagtctatgcaaagacctcccaacaacatgaacaagttacgcgaatgagccaaaggctatattcaaatggaagagatgtcaaggttcaaaaacaaggtctgacaggccgaacaaaagtgtgataaaagggaaggaggtagtgagaccgactctcatagatcatacaaaaggcacaaacaagacaaatgccaacctatctaattagacccaggtataagcgttacacacccctgacctcaaattgagccactattcttgaagaggccttcaacgcgaagatacccataaagctacctctgacacttcctcccagacccaggttaggcagaactaaacactgcagataccatctcaattatggtcaaatacaaaatactattgggctttgaaagaaaaaattgaagaactcatacaggttggataactagcccaattcatgaagaggcctgacaacaacccagcaggagcaagacccagaggacatcaagatgaccatcacagaagtcatgatgctaatagaaggagggacaaagcagaagacagagggagatagaggcatcacaagtagagaccagacatcaaccctaacaagagtaggataacaaacctgctcaacagattaggggagtcatcaacaccattactgtcaaattctgaaagttctacagactatgttagcatccttccagcaagttcaagctttatcaacacctgtttgacaagatgatctgtcttaacaatgacatgttgactctagaaatatggcctaaggcatcgggacgaggttataagtgctgacaccaccttctctatcatctggtatcttctctgggtatcacggaggacacgactcatgaagtaaatgggaatctggtgcttcctatgttcctggacgagggttgagctaatgacttcgtcatctattgagaggtagagaaggagatgtacccttgacttaggttgacttaggactggcggtgaggcaatcattttcttgaaggctaagaaagattgctcacaagctttgcccataagagcggctcagttttcctttatagcttgtagaatggcctcgccttctcttctagttttcagaggaacctgaacaaaaacgtcggtctgccgttcatcttttggacttctctgacattggttgggctgtgcatctctagtattgtcgtgcatttgtcaagattggcttctattccccgatgtgtgatcatgaaatccaggaactttccactgccgaacccgaaagtgcactttttcgcgttgaggtgcaagtcgtacttgtaaatcctccgaacacctcttttagatctgctacgtgttgcgccacactgtgagatttaatgaccatattttccatgtatacctcgacattctgacaatttgttgtttgaagatccggtccattagtctttggtatgtggcgcttgcatttttcaagccaaagagcatgaccttgtagcaaaaattaacatcctcagttatgaatgttgttttctctttgtatggggtgtgcattcggatttgattgtatcctgaataggcatctaggaaactcaatcggatgcgtcgtcgactagcctgtcaatgttggggaaaaggatatgcgtccttagggcatgctttattgaggtcaatgtagtcagtgcacataaccatttgccattggcttttttgaccatgacaaaattggctagtcaggtgaagtacttgacttatgtgataaatttggccttaagtagcttgtccaccttctctctaactgccttgcgttgctcttctcccatcttcctattcttctgtcacactattttggcctgggggcagatggccaatttatgtcatatgatgctaggatggattcatggtgtatcagatagtttccatacaaataaatcttcttttctgcataggacttcagctatgtgtctgtattcgtggctggtaagttccttgtcaagctatatacattattccggtttaggtttgagctgcaacttgacaagttcttcaataggcttcgggcctttgtcgacagtgtcatctcacatatctacatcaaatatgtcattttgatcttccatacttgcttcatagatggttaggatcatgattggggtccttcatccacgctcatgacttgaccattgcattcacgaggggtggggtaaggcttgcttggttctcgaataggaggatagggtgccacctttaagctttcagcataaaagagtcaggcttgcttctgctctaccttactagttacgatctctctcgtcaaggttggcaatttcatcttgagatatggtgtggagatgatgtctctgagttcatttagcattttcctgccaatcaaagtaaagtaagaggtatatgcatcaacaattaaaagacaatgaagctccttgaaagcttgccctgaccgaaggtggtcattacgtctacgtagcctctggtctttactctctctcctgcaaaaccaagaagtggtccatagtgtggttggatcgtactagatgagatttcaagtctttgaaaagtcttcaagtagactatgtctattgagctgccttggtcaataaggaccttagacgccatgaaattggcaatgatgatagagacgaccataggattgtcctggttgacgaaattgatccctttgaaatctttgtcagtgaatgttataggagggaggctccttggtggttgtatatcgacacaattgatgtcaatatctctaattgaatatggatggcattttcgtggtccacaacaacaatagcaaacacaataattgaatccattaaaacaacaacaatatcaaccctctaccagcaaataccaagctcccctgttcagaaagcaacaataattacaacaatttacagctacacgtgcacaacctgtgcagagtagttgtggaccatccttggaggacttgatgaagcaaatgtcaattagcaacatttagtttcaatagaatgtaagcgccatcatctaagatctacagactcagattggacatttagctacaactgtaaaccagatgcagcaacaaggctctagcaacattccggcacaaccaattattaatccaaagaatgtgagtgctattaccttaaggagtggcaagaagcttccaaattcaacagatgttggtgccaaaattgatgatggtgccaaaacagattctgcaccaaaacatattcttctaccttttccttttagatccatttctataaaaaaaatggacttgattctgatcttgttgagactttcaggagggtggaagtcaacattcccctctgttgattcaagtgaagtcaagtatcaagaatgaagatcaagcttttcaaaggttttggacattcaaacatgcacaaatggagatgctcaaagggaagcttaaagaatcaatttgatcatatgtaaaaggaagtatatgatctgataatccatgtgtgtgtgtgtgagtcatgcatcactcattcatttaagatcattggattaaataattaagtaaaagaaaatgatttaaaaggcacttagaaaaataagtttttggaaaaattaagtaacaaataaataatcgattacaagaagtaaaacatcgattattttgttcttcgtgctctttagaaaacaaagtatgatcattgtaatcgattacatatcgttttaatcgattactcaagattttttatgaaaaatggtgctttcggtcttaatcgattacataagagtttaatcgattacttgcttgaacatacatctcaagaaaatgtatgctgactgtcttaatcgattacttcacggaataatcgattatattgttctttgactaaatccagaaaagctcataaacattttaatcgattacagtttgtcattaatcgattactttgtataacttggaaaaacatgtgtctcgggcttaatcgactacgtatcggaataatcgattaaataactcgttcttggaactctgaacgtttcataagctttttaatcgattactgtcttgatttaatcgattacaaatgataaataatcgattactagagcgtaattaatcgattattttcagttaattgacagttataaatagaaagtctgcgactgaaattaaaaaggaagaactgagaattcgtgtgcgattgagagattattgttgtaaacattcacaaacattctgaatattcatctgtgatagagaaacacgtagaaacttcattagattcatgtgggtatattgatcatgagctgaagttttcttcttgcaatcaagttacaagaaaagctgcatatctgtggtgataatctgcatactcatctgttaatcattcatattcattcatcaatggattatcaggtgatatcttttcttggcttttgattgtgtaaacaatttctttgtaaattggtaaaagtatttctgttgtaattagtttcttgcaagcaaagagatagggtttctctaggattcacctgggtagggttctcagggtgaagggtttgtctctaagaatctaatagggttttagatttctgaatttcttctagggttgaaggaaagagacttgtaatattgcttgtaaagattttattgcaatagtggaactcctctctagtgttgagttggagaactggatgtagcctcatagtggttgaggtgaaccagtataaaaatctgtgtgttctctttattcttccagttcaatttcgtattactttgtttgtgaatcaagaccattgctcagatttgtaatactctgttttctgttgctcataaaaagggaagattgattgaaaactgattttgatattgagatttgttttgtctttgaaaattggtttaaatgtgataaagatcctgtggtttataactctaatgtaaaattttaattggacaagttttcaaccaattcaccccccctcttggttgtttgaagtgttcctttgtttttcaattggcatcaagagctggttctcgaaagttactcaagatcactttttcttttcaaaaggaaccatgaatacttcacaaataacctttaaggagggtgcctctttaaacagacctcccatgtttgaaggggaacatttaagtttttggaaaaatagaatgaaaatctttatccaatcaaatgaccctagagcatggaatgcaattgtgaaaggaccttttattccaaagaaaactgtggcaaatgagttgattcccaaagaatgggacgaaatgactgaagctgaacagagaaatgtacagtatgattttaaggctaaaaatatgatcacctttgcactttcctctgatgaatttttcaggactgtgagatgcacaagtgctaaagagatgtgggagatgcttgaaatcactcatgaagggacagaagaggttcgaaggtcaaggaagcatgccttgattcatgagtacgagatgttcaagatgaactccaatgagagcatttcacagctacagaccagatttactcatatagtaaatcatcttttgggtcttggaaaagtgtttgatactgaggagcttaatatcaaaatattgaaatgcttgaccagaccttggcaaccaaaagttacagcaatcaaggagtccaaagacttgtcaaaaatgtcaatggctacattatttggtaagattcttgaatatgaattagaaatgtctcaactaacatcttgtgaagatgcagagaagaaaataagaagcattgtcttgaaagctgcaactgctagaaatgaaaaggaggaggaaaacagtgaagaggatgatgaagagaatgtgaacttagttgtgagaaagttcagcaaatttctgaggaaaaacaagaacaaaaggttcagcaaaggaagcaaaaacagcagcaacaacaacaacttcaacaagaagattgacaacaactttacatgttgtgagtgtggcaaaccaggtcacatcaagtctgaatgtgcaatctacttgaggaagcaacaagctaagagcaaagtcaagaagaaaggaaaagggaaaagagcttacatagcttgggaggacaatgagtcaacaacttcagattcttccactgaaaatgaagaagctaatatgtgtcttacctcaaccatcaatgaagatgatgatgatttgcttagtgaaggaagtgaggtaaattctaaacttgaccaagctattcatgcttttcaagaaatgtatgaggaagcccaaaaacttgcaaaagccaataataagctcaaaggaaatcttagatggcatattgaaaaaaataactgatttgcaaaatgaaatttgcagcttgaaagaagaaaatgaaaaacttgtttcaagttacaaattaaatggctgtgtgtgtgcttcttcctctagcaatgttgacaagtataagatgcttcaaaaagactttgatgattataaacaaagtcaaggtgaagagtatatgttgcttttatctaaaaatagctatttgattgatctcttgagaaagttttataaaggtaaatgcaacttggctgaaatgttaagtgtgcaaaaatatgctggtgatacttctggattggggtacaaacatggatcaaaatcttttggaaaaacagtttttgtacctccaaaacagaagaatcaaaagtggcaaaagaactcaagagtcaacaaatattctgattttaggaaaactcaaaaatctatcacttgcaactattgtatgaagaatgggcacacatcttttaaatgctatgctaggagattctttgtgcccaatggtgattgaatttggattcccaaaataaccagaaaagctaacccttatggacccaaccttgagtgggtacctcccattaaattttgatttgcttttgtaggtgtgtctaagagctagaacatcaacatggtatcttgacagtggatgctctagacacatgactggagacatgtcccttctctcaaatctgacattaaaagaaggaggatatgtcacttatggtgataataacaaaggcaagatcattggtgaaggaaatattggagacaacattaaaaccaagatcaagagtgtgctatatgtagatgggctgaagcataatttgttgagcattagtcagctttgtgataaaggctataaagtgaatttcaacaaagacaactgcatgataacagatgacaagaatggcgaagtactgcacataggtaaaaaaagaggtaacatttatgtgctttcaattgatcatgcattatttcataaatcttcatgtcttatcagcaaagtggatgaaacttggttgtggcatagaagagcaagtcacatgaacatgcatcacatgaacaagctcataagaaaagatctagttgttggtttacccaaactcaagtttgagaaggacaaactttgtgatgcttgtcaaaaagggaaacaaactaaaagttcttttcaaagtaaaaacattgtttccacttctagaccacttgagctacttcacattgatttatttggtccttctagaaccatgagtttaggtggaaattattatggacttgtgattgtggatgattactctagatatacctggactatgtttttgaaatccaaaagtgaagctttccttgcttttcaaaaaatggccaaacttactcaaaatgagaaaggaagtaaaatagtttcaataagaagtgaccatggtggtgaattccaaaatgagttttttgaaaagttctgtgaagagaatggaattaatcacaatttttcagctccaagaacacttcaacagaatggtgttgtggagcggaaaaatagatctcttgaagaaggagctagaacacttcttaatgaatctaatttacctaagtatttttgggctgatgcagtaagtactgtgtgttatactttgaatagaacacttataaggcctattttaaagaaaactccttatgagctatacaaaggtagaaagcctaacatttctcatttaagagtttttggctgcaagtgttttgtactgaacaatgggaaagagtcattaggaaaatttgatgctaaggcagatgaagttattttccttggatattctttgcatagtaaggcatatagagtgtttaataaaagaacaatgtgcattgaagagtcagtacatgtgatttgtgatgagactaacacctctaaggaggaaaaagtattaaatgatgatgcaggacagctggaaacaattgatacaagcaatacctcaacaaaacttgaagaaccaagtgttgaaacagaagaaagactcacattccctgaacaaatgcccaaagattggagaacaacaagagacttatcacttgacaacataataggtgaagtttcaaagggagtatcaactagatcctcattaaaaaatctatgttgtgatatggcatttgtttcacaaattgaacctaagaatattgatcaagccttgaatgatgaacattggatgcatgcaatgcatgatgaggtcaatcagtttaagaggaatgaagtttgggagctagttcctaaccttcatctctaaaacctattggcacaaaatgggttttcagaaataagcttgatgagagtggaatcatagtaaggaacaaagccagattggtagctaaaggctataaccaagaagaaggcattgactatgaagaaacttttgctccagttgcaagattggaagcaatcaggttattacttgcatatgcatgtctcatggatttcaaactttttcaaatggacgtgaaaagtgcttttttaaatggatacattgaggaggatatatatgttgaacaacctcctagttttaaagattttaaacatccagattatgtgtataaattgaaaaaggcactttatggtttgaaacaagctcctaggcaatggtatgaaaggttaagcaagttcttacttgaacaatcctttactaggggcagtattgataaaaccttgtttatcaaaagacttagtaatgatttcttattggttcaaatttatgtggatgacataatatttgattctactaaccacaaattgtgcaaggatttttcatcagctatgcagaaagaatttgagatgtcaatgatgggtgaacttaccttcttccttggattacaagtgaagcaaatgaagaatggaacctttattagtcaatccaaatattgctcggaaattatcaagaaatttgaaatggagaagagcaaggatgctacaacccccatggctacatcaacatatctagattcagatgaacatggaaaggatgttgatgaatctaaatacagaggaatgataggatcactcctgtacttgacagcaagcagacctaacattatgctcagcgtttgtctatgtgcaagatatcaatcaaatcctaaggagtcacatctaactgctgtcaagaggattctgaaatatctcaaagctacaccaaaagttggtctttggtatccaaaaggtgctactttaaatattgttggttattctgattttgattttgcaggttgcaaattagataggaaaagcacaagtggtacttgtcatatgctaggaagctctctcatttcatggcattgcaaaaaacaatcatgtgtggcattatccactgctgaggctgaatatatatcagctggaagttgctgttgacagagcttatggcttaagcaacaaatgcaagactggagtgaaattagatgctataccactgctatgtgataatacaagtgccatcaacatatcaaagaatccaatcatgcactcaagaacaaaacatattgagataaggcatcatttcctcagggatcaggttcaaaaaggtaacattgaggtaaatttcattgacaccaatcatcaactagctgatattttcaccaaaccactttctagagatagattttactcacttagaaacatgctagggatacttgatgagaataatattagctagcctgttctgtttgtggtttgtgaaatatatgaaagccaacacatccttaaaatgaatatgtatctaaatgattgtatataagctgcaacattgctctgtttttgttgaatgctctgtaataattgattgcactgcgtattaatcgattaaaatcattaaaattcaagtctagaacgaaatctgtaatcaagtaatcgattacacaccaatggtaatcgattattcttcacaatctaagaaaacacctttctcgggaataatcgattacacatcgggataatcgattacttaataatcgtaatcaattacctatgctattgaaagatgctcactttgtaataatcgattaccatacgggataatcgattacatatagctctgctacttattcagatgaatcaatgctctgtaatagtcgattacttaaagaaagaatcgattatcatttgttgtaaaagataaaccagttgaactgaaataatcgattactctgcaatataatcgattatttgtgctgttatccgaaatctgacagatttttatagagaatcaaagtatccaatccgtttttgaaactgcatcctatgtcattaaactgttctaacagctatatttttgaaaatatggtcagttatgctttaattcttctctataaatagaatcctgtgtatcttgaatcatgcacaatctctctttctcacttctatatttttcttgtatcttggctgtaacccacaattctttttacaatacaatgtctgagcgtacatccaagcgtattaagaaacctaagagaaaacttggtgaatcctcatccaatccccctcaatcccaacctcaacctgccaataggctagatatctggttctcttccgagacagataagatgaactatcttcaattcagtgccactaagcccatagcaactcctaaatacatagagttagagtggctcataagacaaggattccaatttcctgcctatctagagtctcaaaatcttaggagatttttggagatgaagggtaccttctaccctgatcttgttagggtattttatacctgcttgaagggatctatgcaaggtgatatgaggtctaaagttaaaggggtaaccatgcacatcacccctgatatttgggaaactgtaggtggaattacttgtaagggtgttcgtagattcgatgaagcacctgagggctatagcaaaatggacacttatagaagtatgcttcatgatccaaacatgaggcttaggaccagacttagcacaggtcctatgactgctgaggacaggatgctgcactatctgattacctacatcataacccctagagcgaccaatcatgcccaggcaactgatgatgatcttcaattggtgtatgggctgaaaaaccatattcccatgaactgggctttgatctttgaagagatcatgatgaagtccaaaagattggttaattacccatttccatatcctgtttttatttccaggatcattgatcatttcaatatagatgtagaaaatgaagttattgataatactcttgcctacaatagcctaataaaagcttcacatcttactaaaatgggcatgaggaagacaccccaaggctgggtcatggctgctcaaattggtgctgcagaacaaggggagatggctgctgattctgaggatgaaggacaacaattgcaaccaagccaagcacatctagccttctctgattttgaatcccaaatgattcaaaagatggatactatgctgaagcttcaagaggacttcaaggctgaaactcatgtagcctttgaagaaattagggaaaggctagatgtattgaagctaatataaatgatcatgcatctgcaaaaatttaggattcgaaattgattaagtatgatctgagtctgtttagtaatgtccagaaaatgtgctctgtttttatttttgttttgtattcagtattttaatttcagttctaacttgccccatatggttaatattaatgaattactgcaactttagtattaatccgttgtgctcatattatttttgacttttaacaagccaaatagggggagaataattgattaagggggagtaaaataatactctgttaataattgattcaaatttcttatccagatattgatttgaatgaaagctaaaatttagggggagtttaagtacaatactgaatctaacactaatagacaaatgattaaatgaatgattcatgaacaacatggactttaacacttgtttttggctagattgcttgaaagttttcaggttcatactacttatcaaacaagcttattcaaattgatctccaagtaatctgtgcttaatcaagaagaagatttggcatgtttaaaagccaaaaagggggagattgttgattcaagtgaagtcaagtatcaagaatgaagatcaagcttcaaagattttggacattcaaacatgcacaaatggagatgctcaaaggaaagcttaaagaatcaatttgaccatatgtaaaaggaagtatatgatctgataatccatgtgtgtgtgtgtgagtcatgcatcactcattcatttaagatcattggattaaataactaagtaaaagaaaatgatttaaaaggcacttagaaaaataagtttttggaaaaattaagtaacaaataaataatcgattacaagaagtaaaacatcgattattttgttcttcgtgctctttagaaaacaaagtatgatcattgtaatcgattacatatcgttttaatcgattactcaggattttttatgaaaaatggtgctttcggtcttaatcgattacataagagtttaatcgattacttgcttgaacatacatctcaagaaaatgtatgttgactgtcttaatcgattacttcacggaataatcgattatattgttctttgactaaatccagaaaagctcataaacattttaatcgattacagtttgtcattaatcgattactttgtataacttggaaaaacatgtgtctcgggcttaatcgactacgtatcggaataatcgattaaataactcgttcttggaactctgaacatttcataagctttttaatcgattactgtcttgatttaatcgattacaaatgataaataatcgattactagagcgtaattaatcgattattttcagttaattgacagttataaatagaaagtctgcgactgaaattaaaaaggaggaactgagaattcgtgtgcgattgagagattattgttgtaaacattcacaaacattctgaatattcatctgtgatagagaaacacgtagaaacttcattagattcatgtgggtatattgatcatgagctgaagttttcttcttgcaatcaagttacaagaaaagctgcatatctgtggtgataatctgcatactcatctgttaatcattcatattcattcatcaatggattatcaggtgatatcttttcttggcttttgattgtgtaaacaatttctttgtaaattggtaaaagtatttctgttgtaattagtttcttgcaagcaaagagataggtttctctaggattcacctgggtagggttctcagggtgaagggtttgtctctaagaatctaatagggttttagatttctgaatttcttctagggttgaaggaaagagacttgtaatattgcttgtaaagattttattgcaatagtggaactcctctctaatgttgagttggagaactggatgtagcctcatagtggttgaggtgaaccagtataaaaatctgtgtgttctctttattcttccagttcaatttcgtattactttgtttgtgaatcaagatcattgctcagatttgtaatactctgttttctgttgctcataaaaagggaagattgattgaaaactgattttgatattgagatttatgttttgtctttgaaaattggtttaaatgtgataaagatcctgtggtttataactctgatgtaaaattttaattggacaagttttcaaccaattcacccccccctcttggttgtttgaagtgttcttttgtttttcaccctcttggatgccattaaatagatttcaaaatatgcaaagttcttgaaggatttgtgtacccacaagaggaagctgaagggaaatgagtaagtgaagatgagcataaatgtttctgcacttatacagagcaaaattgttgcttccattccaccatccacgttaccaaagaagtgcaaagattgtggcactttcattgtcccttgcaccattggagattgcaattttacagatgcaactcctcaccttagagcatccattaatgttatgcccatatcagtttacaggtcattataacttggtgatttgaaacccactagtgttgtgattcacttagtcaataagagtgttgcacttccacttagagttattgaagatgtgttgtgcgagttaatgatctgatttttccagccgatttttacattttggatattgagaatgagtcttctagccatggttcgacattgatcttagggagaccatttttgatgatagtcaggaccaaaattgatgtgcatgtaggaattcttcccatggagtttggtgatgatgttgtccatttctacatctttgaggccatgtcacatcctgcagaggagcattctatcttccttgtggatatcgttatgttgcagtagatagtgtagatatttgtatagattcactttctgaattttttgactttttttattctaatattggtttttttaactgtagctgtgatgattttactgttatgtgtagtatttgtgctaagatttcctctacagttcactttgattgtgttgcaggtacaaatgcaagtgttgattctcctatttagccactaaccttcccttgtcgtccaccatttagccaccttcattggagctaaagccaccacctaagcaccttaaatatgcctatttagatgaagctcagaagctctaagtcatcatatctagaagcctatcgcttgggcatgaagagaagttgttgcatgtttttcgaagccacaaaaaggccattggatgaatgcttgctgactttcctggaataaatccttccatatgcatgcatcggatactcttggaggatgattctaggccggtaaggcagtcacagaggaggctgaatcccaccattcttgatgtggtgaagaaggatgtgataaatctactagatgcaaggatcatctatcctatttcagataacacatgggtttcacctgtccaagtggtccctaagaagtcaggcatcactgttgtgaaaaaccaggaaagtgagttgattccgactagagtagtcaacagttggtgagtttgcattgactataggagacttaaccaggcaactcacaaagaccatttccctctcccattcattgactaggttctggagaggttggtaggtaaatcacattattgctttcttgatggtttttcaggttacatgcagattcatattgcccagaaggacaaacacaagaccacattcacctgtccatttggcacatttacctacaccaggatgccctttggcctatgcagcgctctagaaccttccagatgtgcatggtgagtatattttctgatttattagagagttgcatggaggtgtttatggatgatttcactgtttatggttcctcttttgatgcatgtttggatagcctctctagagttcttaaccaatgcattggggctaaccttgttcttaactttgagatatgtcattttatcatacatgagggtatagtcttagggtatttagactctagtagaggtaatgaggttgacaaggcctagatcgatgttattacttctctaccataccccgcttctgtgcaggaagtgcgttcttttcttagacatgcaggtttttataggagattcatctaggatttcagcaagattgcactgccattgtccaaacttctccaaaaggacgtagactttgtgattgaacaaccttgcaaagaggaatttaaggagttgaggaagaagcttactacatctcccatcatgcaaccaccagattggaagtttccctttgagctcatgtgtgatgcctttatctatgagcttggagctgtgttgtcatagagagttgataaactatcccatgtcattaattatgcttcatgcactttagattcaccccaagttaactacaccaccactgagaatgagcttttggatattgtttttgctttagataaatttagatcttatttgctttgctcccaaaggtctttactgaccatgcagctttgaagtaactattgaagaatcctgatgctaaacctagattgatcaggtggatgcttcttcttcaagagtttgatattgagattaaggacaagagtggtgcaaaaaacttggttgctaatcatttgattaggatcgagggacctgttgagtcctttcctattagggataatttccttgatgaacatttgatgcatttgcattcatcacataaccttggtttgctgacattgtgaatttcattgttgcatttgttgttccacctcatgcatctaggtctcaaatagataatcttaagagtgatgctaaatattatttgtgggatgatccttatttgtggatgtttggtagtgaccaagtgattcacaggtgtgtaccagatcatgagatttagtctattcttcaattttgtcatagcacacctatcggtgatcattttggtcctcagcggactgctaggagagtattggactgtgggttctattggcccaccatgtttttagatgctcatcactttttcacatcttctgagcagtgtcatagagcaagagggatcattagacaaatgaatttttttttgtttatttaaatattttccctagattttctatttacagatcttgatatgaatcgagattcttagcaagattcgaatttttggaaagatggaatacagaaaaaaatagcgtttaaggatgtttcatattttgattcttccatatcagagcacatcagtcatttccggagaacaataaatgggttatataactttataatggatcggcaaattctagggccatgagattttttatgtatagggtattgattttataggtccatttccagtttctcatgttttttcatatattttgcttgttgttgattaggtttctatattggttgaagctaaggccaccaaaactaatgattctaaagttgttgtggattttgtgagatctaacattttttgtaggtttggtgtgcttagagccattattagtgaccaagggagccatttctgtaacaagtcattgacatccttgctccagaagtatgaggttgtgtatgacttgctacaacttatcatccccaaactaatgggtaagcggaggtttttaatagagagatcaaacaagtgttgtagaaggtagtgcaacctaacaggaaggtttgggcaagctacttgaagattctttatgggctcatagaaccgcttactgaacacctttggggatgtctccctatagggtggtttttggtaaggcatgccactttctagtggagattgagcatcgtgcttattgggtggtgaagagttgtaacatggcatttgatgaagcgggtatggaaggaaaattgcaagaacttgaagagatacacttagaagcctatgagaactccaagatttacaaggagaaagtgaagaggtttcatgactcttggattcttaggaaggagtttcatattggccaaaaagtgttcttgtttaactcttgcctcaagcttatttttggtaaacttcgatctagatgggatggaccttatgttattactaatgtttttccccatggtgcagttgagataaaaaatgaagttgtcggcaaggtcttcaaagtgaatggtcaccaactcaagctatttcatgaaagccctcaagtaggggaggagcttgtggcagacctctatgtggtcatgccaactttatgtgatgatgtgtcctgaatgacatttgaggagtttctttttcccttcatttctatgttgtctctttggttgcatttcattacatgcttacattgaggacgatgtgcactttaagtgtggagggagggatttacaaaacctgttttatctgttttttgttttctctgttttttgttttaattgttttctattatcttttttttttgtttattgtatctatttttgttatatttctatttgttttttgttttctattttttgttttgatgtatttgttttgttttattttttttctgtttttactatttttacatatagaaaataaaaataaaatattttgcagtagttgttttctgtttttgttgaattcagacacttttccatgtttttttataggatttgtaacttgtataaattttgagagatgtaccaatttttgttggattgagaggtttcatatttgatgtgaatcattgttgcaattgttgaagtcataagtaggcttggaaaataaaattgaaggtagattatgtgagatagaattatgccttgtgagtttttgggtctttgtggatgaatcacattattccattcatgttctttcacgtgtgatttcacccttgtgctagattactctagattttaccttgtatctcttgtcattccttgttacacatgcattgattgagatgatttaggtcttctttctgaaacttgttagactattggcaagcgtaccaatgtcgtcgcaggttacaaaatttataagagatcgctgcacagggacttgagctactcagttctcccagatgaaagtaatcagttcaatagttatgtacaataaatatgatcgaaatttcgtggttttacgaaaataatggatttagtgcgtcagaaatacagaaaattatggaaactaataaaatgaatttaattaatttaagagaatgtaggattgagtttcatcgttcataccctcaatatccaattaacatttacacatgtgaatcattttctaacattactgatgcacacattaattcaccccgaatcgatccctcgcattcgagaatcataaggatatttaccgaatatcgatccctcacatatgaaataaataacacaacattacaatcataatctcgtgctatttgcaatgaaaatgttatgctttattcctagcaacgtaatgttaagagtaaaattattcagttcaaatcctaaggacactttccagtcaagcttagaatctaatttcatgatactagtgatcaattagaatcaagcattaagaacataatgaaattatcaataatgtgtagaaaagattcatgaaaatagaatgaacacttatgcaaataaccaagagggggggtgaattggtttttcctcagagtttttaaaatttaaaaacaaattttaatcacagcagaagtctttgaaagaaggatcgtatcttaaaccaattaagaaatctaacttttaaaaacaacttttatctcaatcagaccactcttgagcaacaaccaatattgtgatatgaacaagcataatgcttcaagaacaatatgaatatgaacataaatatacaattacacacaagatttatactggttcacctctcaaccccggaggctacatccagttttacttctaatcaaccttgattagagtttccactataacaaatataatatctttacaagcaaacacagatctctcttaccctccctaggtaaaattcaaaatctaaacctatagacttttcaaaaaatctaagaaccagagatcccctctctgttctaaccactagaaacctatctagcaatgctgtaaagattacaatttgttatatgaacaaacaacaacaaaacaaacaattttaatgaatacaacaataaaattgattcaagaaagatatcacctcaatatcctcagtgcaatgaacaaatttaaatgatcaaaccagactgagaatgaatgccatgatctttcttgatgaaatctttttacaaaaatgcttcaacacaagcttctcatgaagtagatgactcaacaaatgaaagtcttcatgattcttgaatctactaagaatttttgtttctaatgtgccttggtgactttagaatactcaaaaagtgattttcacaatgcttgctcgaaaactcagaagtctacaaaacagaatgagcttcttctatttataaaaaagacagaattaacaacctgtaatcgattattccgtaagtgaaatagattatattaactcatgtaatcgattaaagtgttcatcagaaatctggaaaaaatcttaagaacaaataatcgattaactcatctcgtaatcgattattccagggatacactaaagtaatcgattaatgtcccaaataatcgattatcacaggaagtgtgaaaaactcatcaatgcatatttaatcgattacaactatctggtaatcgattaaaccagataaaaatgcttatgaaaattatgcagatacacagataatcgattattccatgaagtaatcgattatcacagaacgactctaacatagttaaactaatgtaatctattacgaattattggtaatcgattaaagtgttcatatgacaatatgtagttctgtttatatgcatttaatcgattatatcatattggtaatcgattaaaacagtgaaaaatactttttataaaaaccttaatgctttaatgtcataccaattgattaatgttttcatgtgacttaatcatgaattaatggatgaatgtatgcatggcttaatcaacctatgtgaggaataagaggttataatttcttgaaccaagctttgaacaaaatacatatgccatcaatttgagggggcatgtaaaatcaaaacttgtgatcatcctaaacttgattcttcatgatcttcctcaacttgattcttcatcatttctaacaattcatacatatatcaaatatcaaaaaagatacataagggtacaaagattacatccaatcctttggagaaactaacctatcattgtgtagagcaagagatcaacagaatacatgatgaagaaggcgatcctcgacccatttctacagattttccactctttttctctcttctctcacctctctctatgtctccttggtgttgctcatgttctccctctaaaaagtattgttttcacctccctcttcaccattaaaatgacgagggcattgatgttcaagtacagatctagttgaaacatgaaagttacaacaagtctaagtagggaaaagaaaggaagaatagagtataaattaagggaaaataaatatgaagtggatgaaggttactacagatctggcttggtgattttttccttttgtggtggaggttttgggtgatattaaaaggttaaagatgatgaatgacaaagttttttcaaaagtttataaattttaaaaaaataaaatagtgacaatttttatcgattagtatgttaaaataattaatgacaaatccgtcctgtgactcaattttgacgagtcaatcaaagatttccatgttggcaataaattgtatgacatttttgtccttctatgccacgtaagaactttcattaatggtaacggatagaagttaactggaagatgaatttgtcgcactttttacactttcggggacaaaaaattgaattttcatctttcagggacgaatttgtcagcgctctatacacattcagggacaaaaatcgctatctacctatttctattcttcttagcttatttgacttctcttgaattcttattttctcactttaacttagttttggtcttaagcaaataattgggcttaattgataattgttgcttactttcagattttgtgcttacttgacctatcttccttgtgcaaaacctagagcattctacagaactccaaatggagcatatgagtactccctggaaagctaaggaaaagtgctgcaatttttttcacttataagcttgggctaactctgccggtttgagggtcaaattaggcttgaaattcagaatctctgcacttgaattttcggttgcaagcttgggttttgatttgtgtaattaacataattagttagtttagacgggcctaattagagcccatcccttcattctgtcagtcattatatattagtatagctaaataagacaaaaacaaaatttctaacttcttgtacaagttttcataattaaaatattttctctttttctcttaactgttcttcattgttctttattttttttcttcctttcatctttgttcttctattttcttacacaaattttgtgactcttccactaatgatgatcgtggaaggttaaacaattaatcaatcctaggatccagtccaagcaaggagaatttgagttctgattttggtattctaatttttgtgtgaatgttcatcttcttcttcaatcctatttttgattttcatgattatgaatatgtttaggattgaacaaattaggttatagatttatttcctaattttgaattttaatcatagattgtttgaattatatttcaatccaatttgtgatttccattgatttagtagttaattcgattaaaccacttctaatgatatttaatgaacgttcataatatgatcattatctgagaactatgataatttgcattgctttgtttggtgaattagattgatattcttgaatttgttttacaacatcttttatcaattctttaagtttatgcatttttcttcaattcttgtttgtgtttctgcaatttctattcactatctgcaaattgtttgataaaccctcctgctatttataaatggattaagtcaggactgtatctctaagtcgacctaggttaatcccttgtgctacagaattatcttagttttattaattttgtagcgattcgacagtcgttatcatccacccttggtaagccttgctaaaacccaagacgaacatgtccttggtccaaggctcgttaaacccaagctccacctttggtgagccttctgttgccaggttttatttttgctagaatataaggtcacaacattcgtcccttgtgagcttctctagtattaaattttgactttgtaggaacataagaaacccaaggtctgcccttggaaagcactcctacaaagccccaaggcacacccttggcaagcttactcctttggaagtacgacgggcataaccaaaggtcaagattaaaggacttattcttgaataaaaggttccacaaggaaaaaagagataccactagactggttagcaagacctttaaccaggttgaaatcaaacccgagatgatttcctacaatcaaattttctatttcatacaaatccccactaccacacacaacagagcattgtatatacaaggcacaacaacatgcaagacaaggcaaaattccaactgaaaagtaaagcaggtgcattataaaataagaatattgtcaaggttacaaagtgtaacaccccgtaggcctccgacgtgttatcattaataatatcagattagcgtatgaaatagcaaatctacagttcagcggaaacacaggatcgttttcttgatacattatgtatggaatcacataacagaaccataaaatcacgcccctgctgatccagtttatcaaaatcaacaataataagacagataacagatctttaggcagagcaacaacaaaataaacatacacaggtactcagggaaggtatcacatacatatcatcaaagttctgtacaatatatacatcaatgtccacaccacacagaccgtggtgatacaaaagaatatcagtcctccaagagggtatacagaactatacaacaaaactaatcaaatagagccttcaagctctccatactgctcctcaaataagcaacctagtctcaattgggcctcctgccctgagactgatcttcccgaccagacgtgtcacctgaaatcatgcaagccccacatggggtgagataacatatctcagtaagctcagggtccctgggaaatcattcccaccctggcccacagattcgcagcacacacatatcatatatggcccactggcctggccctctggcctcatcatatcaaatcaatatcataatctcaatcacatgacaggtggcagagctcctcaatgcctggcggagctcctcaacgccactgacggagctcctcaacgtcagacctgtcatggtgtggcagagctcctcaatgccacagggcggagctcctcaacgcccagaatacacggcggagctcctcaacgccggtattcatctattggccaacagatatctcaatcacagcatgcatatatcaaatgcaggtacatataaatcaacataacaatgccatagccaatgcatgcagtatgaatcatgaccaacactccccaggagtgtggtgtgcaaccaaaacgggaattcatccccagagaacactgaacttacctggtagggtatctgactgaatctccttcccaggtctgtggctctggccaccaacagtctcaagctcacggcctaaccaaggcacatgaaatctcagatcaaaaccagcccacaggcttataatcacataatatatcacaatataaatctcctatcctagggtattatcaagcttagtccccttgggactactcagagaccttcacaaggtctttcaggctaaaggccaagctgctgagtcaagctaaactcatcacaaaacatacatagacatggccttatatcatcagcctcacaaactcaaaaccacaggaatggcctaacctccatcaaagtgccattcaactagcctcacaggctcatagtagacatagtctaggctctggaatggcctctacgctaatgtagatacaatacacaggccacagacaaaccacagagccaaaatccaaagtcatcataatcaaaaactgaaagctaatccttcatctattctaagccctgatcaactttctcaactggaccctgggctaattctagccccagctcatatgggtcactattcacagggacccccagaatcaaaatcaaacggtgaaacttgcgtttcttacctcagtggcgactccaatcacctcaggacggctttcctaagctcctgtgtcccaatcacgcggtggttctgcgccaagctcgagttctccgagctttcccctctgaggttcctcttctcactcaatctggggttttcaaagaaattgatgaaggattcaagctttctattcggtctaatcaagtttctaaggctcagggaagtgtttagggctcacaacaaggtcctaggaagcttgagagatcatcaatggagtttaagggctgtgggaggaagaagaaatgataattctcccatttcccacgtttttggcccttaaaaactggtctgccgacatacccacgcgactcacttgacctcccacgcgatccacttgagatggcagacagaaatcacctttctgagccacttctcacgcgactcgcgccatatatccacgcgactcgcgccatctcttcgggccttccacgcgactcgcgtggatccccaagtgactcgcgtggagctccagtgaaaaaccatgctttctggaccacttcccacgtgactcacgtggatcttcacgcgactcgcgtcataccctcggccagcccacgcgactcgcgtgaacattcaagtggctcgcgtggcatggcagagccatcaaccctgtattacacatatggcgcgcgtcgcgccacccttcaagtgggtcgcgccatatgccagaaccgccataaaacttgcatttttaagcacctttcaccggctttctaacctgaatccccgcgctatcgcgcggggttaagcgccgaaaaagaaaaaggataagggtccttacacaaagacattagggcccaaaatccaataaagaaaaaataaagaaagatggcctaaacattggccccagcatcttgctcttcgccgatgtcctccttcatggcagctatttcttccacatcaagcagttcaccgtccttcaagtccttaaattggtcaaaaagacccaagtcaagacctttggtgaagaacccagcatgcctgatgccttgtaaaagccttactcgtgctgctccacggcttccttcttgaacaccaacatctcctcttcaagatctatactggcctccctctccttcaacaccttgagcttagactcctccagcttggactctgactccttcaactaggcctggaggtcagcaatcaccttagcagactcagccaccatcgcaacaagttcttccttctctgctacagtgctctccaccttgtcaaccaattcatttttctcttttagcaagtctttacagcacccaaagatcttgtcaccgtccaatttggtgcatagtagcttagcaagagcatcgctgaccctagacgacaattgatggttagaccgagtggcctcaacaagggttacaatagcattgacaatcttaggatggtcctctctccacacagtttgagcagtggccctccactttgcttcctcaatctttaaagaggcaaccttgctcagagcttccttatgcctttgttcattctcctccataatcgccaaactcctccaaaggaagaccttcacagcatcattgagttctgaaccccaactgaccgaatgaggttttgatcaaaagaagacacaaagttagtcggagttctctactcatgtatgtaggttatgctccacattgaattagtatcaagagaagtataaacgtgatctagggagacacttaatgagaagaggaggtaggcatccccgacaacagcaagacaattggagctgaaactggagaagttggaacaaaaggaggcgacgagaccactgaagtactcgtaaggatatttttgctttgtgtgagaagggggctcatcaaggatattttagacatgatggtttcttgttcaaggaaaaaaactatgtgttcctaaaagctttgtgagagaacttttcattagggaagctcgtgagaataatttgatggggcactttggtgtggataaaactttggctattttgcatgaacatttcttttgggcaaaaatgaggcatgatgtgcataatcttgtgtctcaatgcattgtttgtcataaagctaaatttagattaatgcctcatggtttgtatacacctttgcctattcctaactccccttggattgatatttctatggattttgtgcttggacttctagggtccaagaggggaaaggattctatttttgttgttgttgataggttatcaaagatggcacacttcattccttgtcacaagagtgatgatgcttgtgaagtagctaatcttttcttcaaagaagtggtaagactacatgaattgtcaagaagcattgtgagtgatagagacacaaagttccttaatcatttttggaaaacattgtggggtaagcttagtacaaaccttttgttttcatcatcttgtctcccacaaatggatgaccaaaccgagatggttaatagaacattgggacaactccttagatgctacatcaagggtaatttgagaacttgggaggagtgtctacctcacattgagtttgcttacaatagagtagttcacaagactacttccttgtctccttttgaaattgtttatgactttaatcctttaactcctcttgatttattgccattacctaacacttcttccatgattaatcatgatgcttggtctaaagcttcttatgttaggaaaatgcatgaacaagtgaaagaacatggagaggaaaatagaacaatatgcaaagcaagccaataagcacaagagcaagtgatctttaatgaaggagatttggtgtggctaatttgaggaaggatagatttcctcgtgaaaggaaatccaagctccaacaaagaggagatagaccttttaagattttagagaggatcaacaacaatgcttacaaacttgaattgcctagtgagtatggtgtgagtaatactttcaatatttgtgatctttttttgtatgatgtaggtgcaagtgaggaggcaaacttgaggacaagttcttctcaagaaggaggggatgatggaggtccattgcaagctaaagacctagaaggaaaggttgaagaacatcctttggtgagccttgaaggacctatgacaagagctagaattcaagtccttcaagaccaacatccaagctaacttgtatctcttggaaaagcatgaagaagcatgccaactcagtgcaaacacaaaacaagtgttatctgttttaatagattaccaaattcctgtaatagattacataggcattttgtaaacagtttttgacacctgtaatcgattacagcaattcagtttcagacagaaacaagatttgtctgttttaatcaattacaagacatttgtagtcgattacatgagcctgaaaattgtaaataactttgttttaatcaattacaagtgcaaattaatcgattacaacaacattgagtctgcattgcgcctgttgaagcagccaatgatcactttagggaagcttgcacttcaagcttcatttcaattttcattttccttacatttagtgacatttagcttgtaatttcgtggcttttataaggtgtcaaaactgattgtaactaactttggttcattaatacaattttgaaaattgttgtgagagtttctctcttgttcttgttcaagaacttcttcagtcttatcaatggcttcccaatgctattgtggtaattcttcctagacttattggagagcttctccatggtgccttcaccttcatccctaacctttcttccatcttccatttatgcaattataaacctctaaacaaatctattccacaagaagtgctaattgcttgtgttatgaagtttacttggagtttggatttcactgcaaggtagatttgggaaaactaatggctatgggttcagctatacatcttagccagacatcattattgcatgaagaaaggtcatacatatcatagatactatgctaggagattctatgtgcctaatggagattgcatttgggtaccaaagagaaagaaaatagctaacccttatggacccaacctcaattgggtaccttccttcacttaatttgaattttgtaggtgtgtctaagagaaaaatcatcattatggtatcttgacagcaggtgctctagacacatcataggtgacatgttcatgcttacaaatttgactctaaaagatggtggatttgtcacttatggagacaacaacaaaggaaatatagttggagaaggaaacataggagacaacttttaaaccaagataagaaatgctctttatgtggaaggtttaaagcacaatcaaccataatttttcagttccaagaacgcctcagcaaaatggtgtcgtggagaggaaaaatagatctcttgaagaaggtgttataactcttcttaatgagacaaatttgcctatacatttttgggctgatgttgtaagtacagtttgctacacattgaatagattgctaataaggcctactttgaagaaaactccttatgaactatacaaaggtagaaaacgaaacatgcctcacttaagagcatttggatgcaagtcttttatgttaaacaatggtaaagaatctcttggtaaatttgatgctaaagctgatgaagccatcttccttggatattcattacaaagtaaagcatatagaatttttaataaaagaactttacgcatggaagaatcggttcatgttatttgtgaatctaacccctttaaagaggaaaaaaagtgtgaaaatgatgcaggacctctagaagagtttgtacaactcaatagatcaaatgacaaggaaaaggaagaaccaattgcaaaaatgaaacaatcaacacctattcaagagccaaaggataagagaactacaagagatctctcacttgacaacataattagtgaagtcactaagagagtatctactagatcttcactaagaaatctttgctgtaacatggcttttgtttctcaaattgaacctaagaacattgaccaagctttacttgatgagcattggatgcttgccatgcatgatgaacttaatcagttcatgagaaatgaagtttgggaacttgttcctagatcttcttctcacaagcctattggcaccaagtgggtttttaggaacaaacttgatgaaagtggcataatagtcaaaaacaaagatagattggttgcaaaaggttacaaccaagaggaaggcattgactatgaggaaacctatgctccagtagcaaggttataagccattaggttactacttgcatatgcatgcttaatggattttaaactatttcaaatggatgttaaaagtgtttttcttaatggatatattgaggaggaaatctatgttgatcaacctccaggatttgttgatttcaaatatccaaatcatgtttctaaacttaagaaagctctttatggattaatgaaagtacctagatcttagtatgaaatattgagcaacttcttgcttagtcaatcttttacaagaggttaagtagacaaaaccttgtttatcaagaagcatgacaatgatatcttgttggttcaagtatatgttgatgatataatatttggttcaactaatcattctatgtgcaatgaattttctatctctatgcagaataagtttgaaatgtctatgatgggagaattgacattctttcttggacttcaagtgaagcaaataaaaaatggccatttctcagccaatcaaaatactaccttgaagtgatcaagaaatttgacatgaacaaaagcaaacatgctactaatccaatgactacctcaacctatcttgattcagatgaaattggcaagaaggttgatgagtcaaaaatagaggaatgataggatctttactatacttgacaacaagtagaccagatataatgttgagtgtgtgcatgtgtgctagatatcaagctaatcctaaggagtcacacctcactgctatcaagagaatcattaaatacctcaaatcaaccataaaagttggtctttggtatccaaaaggtgcatcactgaacttaattggctattcagattctgattttgcaggatgcaaacttgatatgaaaagcaccagtggaacatgccacttgttgggatgctcattaattacatgtcattgcaagaagcaatcatgtgttgctttctcaacggcagaagcagaatacatagcagttggaagttattgtgcacaaagtttgtggcttaaacaataaatcaaagattttggtgtggaattgaaagaaattcccctgctgtgtgacaacacaagtgcaataaacctatcaaagaatccagtcatgcactcaaggacaaaacacattgagatcagacatcacttcctcagagatcatattcaaaagggtaatctcaaaattgagtatattgatacaaacaatcaattggctaatatatttaccaaatcattatccagagatagattctatgatcttaggaacatgctaggaattattgatgaatcaaatatatgacaacatgcctatgatttgattgacaacatgatatgcaatcttgaaaatataatgaacacttatgcaaaaaaccaagagggggtgaattggttttacctcaaagttttaaaattttctttcaaaatttctaacagcggaagactttcaaaaggatctgtatctttcaaaaccaatttgaaaaatcaatttacttcaccaatcaaaccactcttatgctgtaaccagatttgtataatgaacaaattctatacttcaagaatatcttgaaatacaaacaaaatcttaaaacacacaagatttatactggttcatctcttagccccagaggctacatccagttttcttctaaccaaatcttggtcagagttccgctataacaaatatttattctttacaagtttacaactgatctctcttacccctaggtaaaattcaaaatctatattctatagacttttcaaaagatcaagaactagagatcccttctctgttcttcccactagaaaacctttctagtaaaatctttaaagaatgcaaatgttatatggaaaatacaacacaaaacaatacaaatatcaaacaaaaatatcaagcttgaagttcaagaaggatatcaccttttaatcctcagctaattcaatgatatgaatgattcaaacaatctgagaatgtatgcaatagatgatcaaaacttctttcttgaatctttctttgacactagcttgaacaaatcatcaattttgaatattatgactagaaacacatgtaactctctatgatacacatgatctttgattttctcactaaaatcagccttgaatactcttgagaactttagaaagtgtttatcacaaggtttggatgagtatctatgattttcacttaatgaaataactcagtccaggctgtcctatttataaaaaaatggatataactaactgtaatcgattatttagtcaatttaatcgattattttaactattgtattcgattattttaattagataatcgattaaagtgttcatcaagaatctgaaaatttgtcaagaacaaaataatcgattaagtcatccagtaatcaattattccagatgaactcagttttctaatacacacaagtaatcgattaagttctcatttaatcgattatcatagatcatgtataaaactgatcaaagcacatttaatagattacaatcatctgataatcgattaaaccaaatcaacatgctgtgaaaatttatgcagaagcttatgtaatcgattatcacagagaatgtctgtaatatctggaattttaaccatgtgtttaagcctaggttaagcttggattaagctttgggattagtatttaagtttatggattagagttcttgaggaagaagctttaaaaatgcaagttttagggttttctggcctgcggcgcgacccacgtgaagttcggcgcgacccgcgccatatgtataaatataccaatgctgtctgccatcccaagtgagtagcgtggatgttcaagtgagtagcgtgggaagtgctctggaaaatcatattttcctctggagtcccaagtgagtagcgtggaatcccaagtgggtagcgtgggaagtgctctggaaaatcatgttttccgctggagctccaagtgagtagcgtggatgttcaagtgggtagcgtgagatcgacagtttgcttttataaatgcctctagggctgaaatagaaagggtaaaaaagagaaaagagagaaagaaagaacctccattgatgcactttgagagctccatatcttacccatctctcatctaaacaccttagactcaattgagaaaatgatcagcacctcgagataagtgagataccccgattgatttctgagaaaagggtgagaaatagtgagattgatttctctgagagaacccttgagagctcggagtctaaagacgaaagaggccgtgattgggcgagttatcttagggaaagctattccctggtgtttttgaacgccacagaggtaagaaactcgagctctaaccgttggttctgtgtattgaattttgggattttggggttatcttgaggggtgtttttggaggtgttagagccgttattaggctcggactctgtagagtcctatgctcagaaaggtattctgaggaagttagagccttgaatcatcattagtgatgaagtttgattttggctctgaatctgtacatgcagatggaaaaggttgactatttgactagtctggaccttagagcagttgacaaagttgctcatgagaccatatggatgagtttgatcggttgaaactgatcattacgagaggttggttttaggccattgtaagcagagatatgcttggccatagtcgatcagagcatgtatggaagctctgtagccctgtataggctgagtaggactcttgtgaagggtctgagatcacttgtatagtgattagtatatgtttagagaaaggatggtggttcctttcgttggaacggtttagaaccgtaattgatgtgatatatgtttgttttatgtaggacgtgagcctgatagctcaggtggggttgaccacgggaccgggagagccggtgatctgtctagagcaggtaagctcttggtgcttgtttgtgattcctttgctgtgttccaccataaacccagtggggttatggttctgttatgtatgtatgttagaagaggaatgatgtataatggtatgattgactgatgatatgtgatctaaaccctgtgaaagggtatttgatgtctaatatgtatgtgaatgtatgtataaggttatgaatgctatgaattgttgttggaatgtttactgaaccctgaaaaagggtaatcgatgattgttatgttattaaacccacaaaatgggtaatgattgtgcattctgtggttaactgtgatctgtaccctataaaagggaaattgatgtatgatgtttggggattgagctctaacaaaggaaatggccgtgtatagtggtgccagatgaattgaatgcctgaattgaatctgaggacagagactttgggttcaagtcccaaagcaccctttttataaagactttgggttaaagtcctaaagcaccctttttataaagactttgggttaaagtcctaaagcaactttcttttatcaagactctgggttcaagtcccaaagcacctaactgtcataacactgtaagtccttggcagaggaaccgaggcagtatgagatgtgtgtagagtaagacttcgggttcaagtcctggagcatcaaagcaacagaaaggaaaagtttaattgcttgcattattccatggcttcttattttattgtatatctgtcgtcagtgaaccaggggaaggaaataccttcaagggccctgagtttactgagattttatatctcaccccttgtgtggggctatgttttgcaggtgattcttccaaagcagccgagaggtcccaaggcaagaagcctgtgcaggattagcgactgaaggacacactaggatagaggacttgagcatgttgctcatttattttggttatgtactttgatataccctgatgggttatttgtacagttttgtattgtacagtgaaactttgatgtctattcaccatattatgatgtacagtgttatgatagtgactttgatgatgtcacttctagtttatgcttccaaactgcttaaactctgattgattatatgcttgattgtgatgtgtggttagtaatgaccctaattagtaaattgggggcgttacaatgtccaattctgtgttaagcttatttaatcgattacgaaccagtgataatcgattaaaacgttcataaggcaaaatccagaaagcatacacatgcatttaatcgattatatcacctatgtaatcgattaaaacagtgagaaacaatttttataaaatcctagttgtctttatgaatttctatctaatttcttattaccgcatgattatatttaatcaaatgaatgtatgaatgcatgaatcatcaaaagttaatgaggattatcaggctttatcaatcgagctaagctttaacaaaagttacatatgccatcaatttgattgggcatgtaaaagatcaaaaacttttaagcttcatacttcttgatccctttgcttcagcttcattaaatgtaacaaatcttaagtttaccatgcatcacaagtgaatgaaattcaaattatgttgataaacactattcattctgcataattctctattgtaatcgattactacacgtattaatcgattatattgttttaaaaggccttcagatacaaaagttcactggagtaatcgattaccaaccttatgtaatcgattaactatcacttaaaatgcacttacaaaataaaaatttatggagtaatcgattacgctgcatattaatagattatagtgtattttcagtgaattttcaaagaacacttacctggagtaatcgattacatgttgtatgaatgtcttccaaaaacaaaacatctggagtaatcaattacttcatcgaattaatcgattatcttgtccaaaaagctttttctgaaataaatttgctttggagcaatcgattaccatgcttaagtaatcaattctctatggcgtttctgcaaaactacataattttcgaaaatcgtaactgacttatcttatcttaaattcaaatttgaatttgtgtcagtgtcatttaaacctcttgaaagatgaaaatagttgttacaaggttttaaaattcaaaaattaacctacaaaactctatatatacagatttcctaagaagattaatttacacatgaatccatctctttcttctctacaaaactgagcaaactttttgtgttctgtttctttccttatcctaaacctctgttaaattcattcttctatccttaaacactatgtctacctcaaaaagaaccaaaaccaataaaataagggctagagaatcttccagcatactgaatttgtggttccctaatcaaactaataggatgaactacacgcagttcaatgccactaaactagtcatgcctctcaagtaccttgatcttaattggttcatcaagggatttcaattccctactctattgaaggctcaaggattgaaaaaattccttgaattgaagggtaccttttacccaaaactggtgaaggtgttttacacctatgctaaagccagcatggatggggtgcttcgttcccaagtgaatggagttcccatggtgattgatgaagaagtatggttggctgtggttggtatcccctctgaaggagtgaggaggtttgatgaagaaagtgggggctacaataaaattgacacatacagagttatgctgttgaatccccaaatgaggctgaagacaagacttgatgttgggaatctgaatggggaagataggttgatgccttagattataacctacatccttacccccaggtctacaaaccatgcccaaatcactgatgatgatttacaattgatatatggcatgaaaacttctgtaaaatatgggaacacttcacacttaaccaagaggggaggtgaattggttagacttggtaatttaaaaattttcttgatcaaaatcagagtttttcccctttttttttttggatcattatcacttttgtaaccaagaacccttattcaatccaaagtttaacccaagatatgtaatacttcaagaatttggttgatgacaagaactttcaaacaagaaagataaaatatagcaaataagaagaatatgaacaacacacaaagatttatacttgttcacttcaaacactttgaagctacatctagttttcttccactcaacactagaatggagttccactattgtaaatttcagttcttacaagttattacaaagcctctctttatcaaccctagataaaattcagaaatctaaaacactattagattcttagagacaacccactgagaacactactcagtaaatcccctagagaaactctatctctaaattacaagcaagaaactcatttataatagacaaatcaaaacaaaattcaaaacagaaatacaattgcaaagattaaggaaagaagtcacttgatgatccaatgaacaatatgcatatgaatgatttcaccaggtataagaatgattgcaaccttagaatatgactttccttaagctttgacaaagaaagaacttgcttcactcatttctcaataacccataagtgtttggtgaaagcaactcaatgaacccagaaaaaccactacaagaatgtttagaaagccatagaatgctcagtgtgcgaattgatcaagtttgtgaaaaagctgagcatgggttctatttataagaagctttctaaccgtcagtaatcgattacatacgctcctgtaatcgattaattcgcatatgtaatcgattatttcaagactgtaattgtaacaccccaaaatttagggaattacagacaattattaagaataaaatgaaaagcggtagaaaattagggcaaaatgacaagaacgccctaaacaatttcagaaatgacatctatacccctaagattaaaatgacaattttaccctgaacaattctggtaatgacccaggtatccctcggagaaattaccaaaatacccttgaacatttgtaaaaatgacggttatgcccttaggattaaaaaagacaattttgccctgaataattctggaaatgactaatatatccttagatattttggtaagatatttactgggagaaattaccaaaatatccttggacaatttcaaaaatgactattatgtcctaggatggaaaatgacagttatacccctagacatttttgaaaaggaccaatatatcctagatattttgataaagatatttctgggagaaaattacaaaaaggtccttgaacaaattgggtaattaccattataccctaaggtgataaatgaccaaaatgcccttgaagtcaaaactgaccagattaccttagaaatttgtaggaacctcactattggataaaatacttttagataatcatgaatcagtcaggttggaggcgaaaaaccccaggatagaatttctacaaattttggaaattagattaaaaagagcttaattcagactaccctaggtatcagaaaattatgagaagggtatgagtataatctatggaattttctcttaattgtgggaggaaaaggattcttaactaagttagtttagtaaattttaataattaaagataatatggaccaataagaatttagctattatgggaaaattggattaatatgaatttctaaactaagccttgaccgtatgatacaagatcaatggagaaaaactttaagaaacttcaagaacacacatatggatagttaagaggcttggaaacatgccattggtccacttgtatggtaaaaatttaatttaagtagatttttatcttgtttccttaggaagaacacgtgggaagctctaaacattatttcaaagatcccaacggtcaaaatctagacatgtaagttaggagtataccattaaaattttaaaaatatccaacggttaatgagttcggaataaaaatttttgtaatacgggttttgacagaatttttagaaacaagactaaaactattccacggttttaagcaaaaaattgtatatgattggcttctaaacctccataagaccgtgcacttcaagcaaaggagaagaaagcttgagaaagttcaagattagggacacttggacggttacaagcaagacataatctaattggaccatttggaagtcacttaatcatgatttaagaaacaaaaatctctacacctagacctaagcaattaacggatttggactaaataaaaggcaccaagaacaagcaattcaacgtgccaatactagaaggaagtggaaaaatatggaactatcatgactaagagacacatgtaaggtaggaagactttagccaataggaaaaatacaactaaaaagcaagcatcatgaattctatgatatttttatttaaaatcaaagaaagtagtctatataaaagcatggaagttcacggactgcaccttaacaaaactccagccatctccttttcaattactttctcaaacacataaagctaaaaacaaaggagcaaggcaccaagcttcttggatttgcacgaccaaaacagtttatcttcaaccaattcttttcactcaatcttcatccaaaataaaagccaaatataagaccacttctcaagaaactcacgtgtaggaaacaaggaaatttggaagtgaaactgctgaaattttaatcaaggtacgggagtattttgatgaacatgaattagatagttgattaggatccaattctctttgattaaagccatgttcttgcttgttttatgaaactttaagtgaggtataccatgtgtttgatgaaagccctcaatgaacttaagaatatatagactagtatatggatttaaccataaacattttaattaacttaacttaattaagtggctgtccaaaaatgaatcctactttgtaaccataaaatttcttagctgtattttaaatttaaatgattgctgtatgttaacttattttggttgagtatggctgtaataaaaaaaagatttctgtaggttaagttatttagttgctgtcaattaataattttgtgtgatattctatattgctgtatttaagttgctgttgctgtaaattggtcgaatgatattgtatgttgtagctgtatttaattaagttgaaggttgctgtaagtcataggttgttgcatattttagtgtgttgctgttataaattttattacgttgctgtagttaataactgctgtatgatattatgttattacatgccgttgtatattgttgtatttagaattccataaagctgtaggttatgttgctgtatttaatgtcgctgaaaatattatgttgctgtatagtttattatgttgttgttgctgtatcttgttgtgatggataatttaatgtggctgtaaatcattatgttgttgaatatgagtttgctgtatgttgctgtatgtaatgtgctgtatgttattttgttatgttgagtgtttccataaagcacaccaagtatttgataaaaggtttcaaaaaataaaatatgttatgtgatcttttatgtgtaaatatgaagtgttgattggtggtttatgattttgatgttgagaaacgaagcaagaattgtgttatgttaatgatggaataattggtgattatttattctaagagctgtggcggtatgatgagactgtggtgtaaaattctatgatggtggaaataagctttatgtgttgttctaaaaacatctgccacaagacttgataaaataaattattcatgcatttcatacacatatgcctgatgggggttaatccgtggaagttgatgccttgcaggggttaaaccgtagagttgtgtgtcagatagttagaagaactgagtatgagcgttcagactgtgagagtctgagctgggggatgcttcggcagtggggaactcacgccacccatgatgatcacatgtagagtgggtgactttcctgtgcacaactgtgacatcctgactgatcatgcaagttctggaccagtgattgaggctatctgactgtggccactaatgttgatttttatgagaaactgagatctcagtcatgcatcatttaaataagaaaccatgcatcattcatcatatatttgttctataaatgttatttatgatacctcatatattcgttgtttaatttaaatctgttatgtatctgatatactattctgtttcctatcgattatctaattatgtttattaaaatacttacccgagttgtgtctgtggtttgacacctgtgatgaccccaatttatttgggtgagcagaggaacagtgaaagctgagatatggagaaacttggatgacttgcttgctgtgttttgacttgatgaatggatgatctggtttgatgttgccatttttgtgaattatggagtcgtactgtactgtatttgtattttattttggataattgtacacggactgctatatttagttatgcttctcattataaataaatctggtgaggataatcgtttatgttacttacgaattataaaattagcaagcaaagcgaaacgaattttcgtgaaaaaatttatactaatttaattttaatacaaagtggacacgtaattttatctaaaatcaaccgagcacgagagagtaacgagaggcgttacagtaatcgattaaactgttcaatagatgttctgggtttgagcaatgaatagaataatcgattatcccgtctggtaatcgattaagacagcaagctcctatttttgaaatatactatgtaatcgattacgaattttggtaatcgattaagtcaaggagcttcataaaacagtatgtactatgtaatcgattactacatttggtaatcgattaattcagtgaaacatgttaatcataggcataaaatgtaatcgattactatctgtgataatcgattaagacagagagatgatatttcctatttagcctatgtaatcgattactgattgttggtaatcgattaaagtattcattatatcagtttatatgaaattctaggtaaaataatcgattaatccgatacgtaatcgattacattgttcttgaaataatattttccagaaggcacaaagaacaaaataattgattcttattattgagtaatcggttaaaccagcaaggacatatttttccaaaaactttgattaaacttgcttattttactaaatgcttgttatattaaaacttaattttgattagctaaatgaataatatgaatggtatgcacatggatcatcagaaaatacttcttccttttacattaatcataacttgatctccaaagcttcaaagcatgttgaaagcacaaaaccaagcttgttccattattcaatcttcaagtgattcctcttttgtatcaacaatctcccccttttttggctttaaacatgccaaatattcagttgattaatcagtaaggcttggagtttaattgtttgaatcaattttgaagaacctcaagctttgcaaacttgaaaaactttcgtaattcttttgccaagaacaagtgttaaaaccatttgtgattcaagtatcattcatttacaaatcatatgcattagttagcttcctttaatcattacaactccccctaaatatagcattcattcaattcaattttttacacaaaatgaaccagataacaggggcaaacagagtataatttaatcaagcaacactcccccttaatcaagcatttctccccctatttggcttgttaaaagtaaaaaatagataaggcacaacggatagtgaatgaatcaaaaatatattaaacatgaaagactaatacaaatagataattaaaagtgttcagaattttaaaaactagaaactaaaacaaacatcataaatttaaaattctacagaagcattgccattcatatttgcttctattgaatctaatctctccctaatgtcctctaaagcctcatgaatttcatccttgaagtcctcttggattttcagcatggtgttcatcttttccagcatcaaggactcaaactcaaagtaagcaggctgttgaggctgcactccctcatcttctgaatcagcagccacttgatcttcaacagcaacagcagcagcagcagcttgggtagccatgatccatccatctggagttttcctcatgcccatcttggtgaggtgcttctcctcgatgaggctgttggaggtgttggtgttttcaaccacttcattttccacatctatgttgaagtggtcgataaacctggagaccagcacaggatagggaaaggggtagttcactaatctctttcatttgagcattatctcctcaaagatcagtacccagttcatgagtatgttgttcttcagcctatagaccaattgaaggtcttcatttgttgcttaggcatgattagtggcccttggtgtgactacataggtgattatgtagtgtagaagtcgatcttcaggagtcatggaccagtacccaatctactcctgagcctcatgtgggggtcatggagcatctccctataagtgtccaccttgctgtagccatctggttcttcatcgaacctcctagccccttcacatactactccagccacagactcctaaatttctggagctatcttcatggtcactcccttgaccttggacatcatgtcccttgcatagagcctttcaaacaggtgtaaaacaccttcactaaatcagggtagaaggtacccttcatctctaaaatcttcttagcccttgggcttcaaagaaagcaggaaattggaacccttgcctaataaaccaatccagttcaaggtatttgggggagctttgtgtaattgattatcccgagtggtaatcgattattccagagaaacccttattcctaaactcgagtgtaatcgattacaagcttatagtaatcgattattcctgtgagaaacttagttataaatgatttttgatcaaagtaatcgattatcccattgtgtaatccattattccagtcaagcatgatttctaaaatatgaaacataatcgattaccaacctgtcgtagtcgattacttaagcacaatttgcacactgaaagtgatttttagtgattttaatcgattaacccgtagagtaatcaattattccaatcaatgtatcagaaatagagtatttttacaacttgatacgaattttcgatcattcaatgataaatgtggcattgaggcttttatttgtcataagaatcatgcatcaaacaagctagtttatgttactttcatcaagaatgcctagcatgtttctaagtgtataaaatctatcttttggcaaaggcttagtgaatatatcagcaagttgattatgggtatcaatgaattctaccatgatgttacctttctacatatgatctcttataaaatgatgtctaatctcaatgtgcttggtctttgagtacatgacaggattctttgaaatatttatagcacttgtgttatcacaaagcaatggtatctcatttagttcaactccataatcttgcaattgttgtttgagccatagactttgtgcacagcaactcccagcttaaatatactcagcttctgcaattgacaaagctacacaagcttgtttcttgcaatgccatgaaatgagtgagcttccaaggagatgacaagttccacttgtgcttttcctatcaagcttgcatcctgcaaaatcagaatcagaatatctaacaatatttattcatgcacctttaggataccatagcccaactttgggtgttgccttgaggtatttgatgatccttttgactactgtaagatgtgactcttttggatttgtttggtatcttgcacacaagcaaacactaagcatcatgtctggtctactagctgtcaaatacaataaagacccaatcattcctctatatttggattcatctaccttctttcctttttcatctgaatcaaggtatgttgaagttgccataggagttgcaacatctttgtttttctccatttcaaacttctaaattacttcaaggcaatactttgattgattgaggaaagttccatccttcatttgtttgacttgaagtcctagaaagaatgttaattcccccattatagacatctcaaactcactttgcatagctgcagaaaattatttacaaagcttttgattagttgaaccaaaaataatatcatcaacatatatttgaaccaataggatttcatccttgtgccttttgatgaacaaggttttatcaacattgccccttacaaaagattgatcaagtaggaacttactcaatctttcataccatgatcttggagcttgtttcagaccatagagggcctttttaagtttaaatacatgattaggatgtttaaagtcagaaaaacctggaggttgttcaatatatatgtcctcctctatgtaaccattcaaaaatgcacttttgacatccatttgaaaaagtttgaaacccattatgcatgcatttgcaagtaatagcctaatagcttccagtcttgctactggagcaaaggtttcctcatagtcaatgtcttcctcttggttgtaacctttagcaaccaatctagccttatttctaactatgattccactttcatcaagtttgtttctaaaaacccactttttaccaataggcttgactgatgaaggtcttagaacaagttcccaaacttcatttcttttaaattgatttagttcatcatgcatggcatgcatccaatgttcatcttgcaaggcatgatttatatcttttggttcaatttgagatacaaaggccatgtcacaacataaatttctaagagaagatctagtagagactccctttaatacttcaccaatgatattgtctagtgaaagatctcttgtggttctccattctttaggcctttgatttggtgttgaaggaccttcttcaacactaggttcatccttttcattgatagacattttctcaagctgaatattttgctctatttgacctgcatcttcatcacaatccttttcctcttttaaggggttagattcatcacaaattacattgacagattcttctatgcacatggtccttttgttgaaaactctatatgctttactttgcaatgaatatccaagaaatatggcttcatcggcctttgcatcaaactttcctagtgattcttttccattgtttaaaacaaaacacttgcagccaaaaattcttaaatgagaaatattgggctttcttcctttgtataactcataaggtgttttcttcaatatgggtcttatgagtaatctatttaaagtgtagcaaacagtatttactgcataagcccaaaaatattttggtaaatttgtctcatttagaagtgttctagcaccttcttcaagtgatctgtttttcctctccacaacaccattttgttggggtgttcttggaactgaaaagttgtggttaattccatttttctcacagaatttttcaaaatgttcattttggaattctccaccatgatcacttctaattgagataattttacaatctttctcattttgaacaagtttggctaattttctaaaagaatggaaagcatcactcttggatttcaaaaacaaagtccatgtgaatctagagtaatcatctacaataacaagtccatagtaattaccacctaaactcatagttcttgaaggaccaaacaaatcaatgtgcaatagttcaagtggtcttgaggtggaaacaatttttttactttgaaaagagattttggtttgtttccccttttgacatgcatcacataatttgtccttctcaaatttgagttttggtagaccaataactaagtccttcttaatgagtttatttatatgatgcgtattaatatggctagctctcttgtgccacagccatgtttcatctaacttactcattaagcatgtggtcttgtgaaaaaatgcatggtctatagaaagcaagtaaatgttacctttccttttgccaatatgaattacctctccacttttgccatcacaaattttgcagcaatcttgattgaaggaaattttatagcctttgtcacataattgacttatactaagtagattgtgcttcaagccttcaacatagagtacattgctgatttttgtatttaagctatcaccaatgcttccttcacctatgatctttcctttgttgttgtctccataagtaacatagcccacatctttaagagtaagatttttgagcaaggacttgtcaccggtcatatgtcttgagcatccactatcaagataccataaaaaaagagcttgctctaagacacacctacaaaaggaacaaattacttcaaaggagaaggtacccatttgattttggtccaagtgggttagctgtttgttttttcttttctacccaaatgcactcaccatttgggacataaaatcttcttgcaaaacatttgtaagatgtatgacttttttccatacaatggtgacaaatcacagccttatatgagtttccaaagaacctattttgattgaatctttgtttcttctttttcttatgttttggaggtatcaatgttgtcttttgaacatttttaaaactctttttataccccaaaccagaagtgtcaccaaactatttttgagcactcaacatttcattcaaatcaaattttcctttgttgagtttttccaagatatcaatcaactctttgttctttgaaacaacctgcaagtatttttcttcttggttcaatctatattcatcaaaaaccttttgcagcatttcatatttatcacttgatgtagaggaagaggtacacatacaaccacttgatttgtagcttgaagtaagtttctcattttcttccttcaagttacaaatttcagattgtaactctattattttagcaagctttttggagttcacttcaaacactatgaagctacatctagttttcttccactcaacactagaatggagttccactattgtaaattttagttcttacaagttattacaaagcctctctttatcaaccctagataaagttcagaaatctaaaacactattagattcttagagacaacccattgagaacacaactcagtaaatcccctagagaaactttatctctatattacaagcaagaaacccatttacaatagacaaatcaaaacaaaattcaaaacagaaatacaactgcaaagattaaggaaagaagtcacctgataatccaatgaacaatatgcatatgaatgatttcaccaggtataagaatgattgcaaccttagaatatgactttccttaagctttgacaaagaaagaacttgcttcactcatttctcaataacccataagtgtttggtgaaagcaagaactcaatgaacccagaaaaaccactacaagaatgtttagaaagtcatagaatgctcagtgtgcgaattgatcaagtttgtgaaaaagctgagcatgggttctatttataataagctttctaactgtcagtaatcgattacatacgctcctataatcgattaattcgcatatgtaatagattatttcaagactataatcgattaaactgttcaatagacgttctgggtttgagcaatgaacagaataatcgattatcccgtctggtaatcgattaagacagcaagctcttatttttgaaatacactatgtaatcgattacgaattttggtaatcgattaagttagggagcttcataaaatagtatgtactatgtaatcaattactacatttagtaatcgattaattcagtgaaacatgttaatcataggcataaaatgtaatcgattactatctgtggtaatcgattaagacagagagatgatatttcctatttagcctatgtaatcgattactgattgttggtaatcgattaaagtattcattatatcagtttatatgaaattctaggtaaaataatcgattaatccgatacgtaatcgattacattgttcttgaaatattttccagaaggcacaaagaacaaaataattgattcttattattgagtaatcgattaaaccagcaaggacatatttttccaaaaactttgattaaacttgcttattttactaaatgcttgttatattaaaacttaattttgattagctaaatgaatgatatgaatggtatgcacatggatcatcagaaaatacttcttccttttacattaatcataacttgatctccaaagcttcaaagcatgttgaaagcacaaaaccaagcttgttccattattcaatcttcaagtgattcctcttttgtatcaacaatcaacttagattaactaggttcttgtttttattgaaactatgctgaaaacttcaagattaatcaattatcattttccatatgttgtgttaatttctaatttcatatattactttaagattaatgtctgaaatgagattgtagaaaacaccacaaacatcactaatctcatcaaagagaagcatttcaacaagtttggattaatcaagacacccaatgggtggcttatggctggagaacaagctccacaagagggagctgatgaaggtgaagaagctgaagaagaagttgctcctgctcaacaacaatacactccatttaaatcgttaatgattcagaagatggatgttgtgcttgctctgcagcatgagcatagggctgaaacacagtcttcttttgaagacattacttctaggattgaaaatttagagactaggatggctctcaaagattctgaccttctctagctagattagctggatgtaattgtttgcttatggtgtttctgctttctttttgtttcctttgatatgttttttgttatgttactttttgtactgacctcttgattaatgaaacaaatatgttctgttcttgcttatctcatgctcatcaatatttttttgtctttgataagccgaaagggggagaaaatttcttaaagaacatgtcttaaagaacatatattgaataaacatagttttatatgcatagctttatggaaacatagctcacacacatactcagtttcaaagcaatagatatatatgttgctctttatcttaatcaataatcaattacataagatagggggagcatatacatacatatgaatgagtgtaaaatgtttatgcaaagcatgcttaacacttgtcttggaaggaagctgatttcattttcagatatcaagtataatctcctggaaatcaactcctttaaaagaacttcaaggttcaacatgttcaattgatgtttggcatgatcaaagccaaaaagggagagattgttagattcagggagagcatgaaggtggatcaagatacatgctgaagatgaatgagtgttttagctttgtacatgtcattcaattgaaggcatttgtaattgcttgatgtaggagacaatcatcctatgatcgattgcattacattaacatcattcatttacttgcattcatgattttacataagcgcgtggtttgtgaaaaggtttgagattttatgattgcatcaaagcaaagtgctaggtttttggaaaaactattttttttcactgttttaatcgattaccacacattggtaatctgatacctaagctttgaagaacaaaataatcgattaccagcattaagtaattgattcatgattgtgttaatcgattaccatttatcagcaatcgattacttagttcaaacatagaacaagacatgactatgttaatcgattaccatttatcagtaatcgattacttagttcatttatggaacaatgtatccctgtagtaatcgattataggttactttgttcatataacctttccagaaaactgaagaacattttaatcgattacatttgtatttaatcgattacaaatgaagatttaatggattacttaggtgatttatttgattacatccagttacaactattttttataaatagcataaggctttctaaaatattacatattacaactctatgaaattctaaaagttttcataagtcttctgagattgagaaaggttactctgagttctaaagtgcttgacccataaattcaaatcttcatggtgttttgaaagatttcttgggcaagacaacaaagaagctttttggagaagaagttctaaaattgcttttcatttcaattctttttgttaactcatattcattcatattcagtggatcatcaggttgtttctctccattaggtttgcttgtaaatccatctttgaatttttggttgtttgtaactattacaagggttcttgaagtttttctagactgagtttctctagagggaaaaagtaggtgttggatataggggaagttgcaagaataatcaaaagcaaaaacgaagaagaagcttgagattagcttaaagttatttttgctttatcatgtccaatcaagtatgaagacatgtgcaatgtgtttaagtttgattcaaatacattgctttgtgatccttgcattgccatatgcatgtctcattgaatttgcataagtaggttctattaaaacttagaagttactaaataatttcaaagaaaaacagattctcatggcttatttttggaaaatgaaaacttactgttttaatcgattaaacagtgttttaatcgattaaaaggctcttgttcttatctggaaaagccatgaagaacactttaatcaattacatgattgagttaatcgattacatagtgtattttggaaaaccatacacttctgctttaatcgattactgtttatcgaaatcgattacataggctttttagaaaactctgtttttctgctttaattgattacattgcggaataatcgattaatctgttcgtaatctttttccagatttctgaggaacaatttaatcgattatttagttattttaatcgattacatatggcaaataatcgactacattagcggattaatcgattattgtcagttaattctattttttaaagcctttgtaagtcagttctttataaatagaacttgtgcgaattattcaacatatctgagtgacttaccaaagaaaaataaaactttctaaagtgtccaagaaactgatttcatagtgattaacacatcttgtaatgatcaagatttctgtattttaaaaaggatgtgctaaagaaaagaagatttcaagatattgattctgagcaatataattcatactacctagattgtgtggtaatctcatttcatttttcattcacttatacatgatggatcacaggtagtgtttatcttgatttattcttttttagattttttaagagttttgttttgttgtgttgcaacatttcaaattgattccttgtaaagcattctagagaagggttctctaggtttgaagatttgagtaggtttctcaagatctttgtgacttgtattctaatagtgttttagaattcaggatctttgtctagtgttgatagagattgtcacttgatgtgcttgtacaagaataatttgatatagtgcaaactccaacctagtgttggttggaagacattggatgtagcctccgtgtttgtgaggtgaaccaacataaattgtcgtgtgattgtttctttatctgtatatctttcattgatattgtttgaaaatcaatatacaatcaataagagatatttcaatcattacatgcatttcaaggtgatattaaatcgaaagaaaaatatgtttttgatcaagggtgattaagtgatatgatccaagttttaaatttcccaaattgttttcaagaaaagtttttaaaggtggttttaaccaattcacctccatcttggttatttgaagtgtgttcacagtattttcatagagaatggttctttatgtcttgatcactaggagtctaatagggttttagatttctattctttatctaggtttgataaatggtgattgttgtaaagcttgtaagaacaaaaatttgtgaatagtgaaactctaatctagttttgattagaagaaactgatgtaccttctcttgttgagaggtaaaccagtataagttcttatgttgattactttcttttaatttcttcaagttatcttaatttgtggttcttggtgaattctttattactcaacaagtagtgtttttgtaattgttttattgggctgagtgatttgatttattgaagcattcttgatttatttgtgataaagatcctttaactctgattttctaaagattttaaaaagaccaagtttaaaccaattcattccccctcttggttatcgtgtattctcattgttttcaaacctgactgttgagggttgacgtccgcgctcctgtaacaaagttgacatgaagggtgaacaagtacgttattaatgtagctgggttgacacacggagagcgcatgtacactattaatatagtatggttgacatgaagggtagatacgtgtagagtgatcccacaataatggccacattaattttatttacaatacaatcgttgactaacacaactctcctttttatatccaagcttaattagaaaattacaagactagaatatttttctgattaattatttaaaaaagtagtaccgaatacatctttaattttacttactggctgatatatatcacttgttttctgattaactatttaaaagaataatgagacggtagacacaaaagtaaatgacttgtcgtaaggaaacatttatcatttccttgcaaaaataaaagatatattaaccaactatttctcaagtttcacaatattttgttcaccttcgcgctgaatttctttgaattattgaaatgaaaagtcgcgtcatgactttcgctacgatgtcgactagtataattgattaacctcaagcacgtctccctgtataggtacataactataattagaaattatttctgtttcagtaatgactagtcatacttatgctaccaattaccatggtagtatagtgaaaattcgtaaaacgtgatgcaatgaaaacacggtgcagtatcatatatagcagtaaattataaacaatatggtataataattttcattgccatatagtcagaaacaagcacttctcataattcaaaattcccggttaggtcaaaattgtaagctattgacgaatcgtaatttttcttccaagcttgtgtacatttttacgaatcgtaatttttcttcctaatccggcgaaaattcaattgcttctatccaaaccctttcaaatatttccaaccatacccaaaacgcggtatttttgaaatcaaatcccaggtgttacctatatatattggacacattcattcctcgggataacatagacaaacaatttcttcatttcattaaactgcaatttttgttacaagatgaaacgttttgtgttttctctagcatgggcttttgctcttgtgctagcttcttcgtgggctcatgccgcggttgtggaacacacttttaatgtatgagtgagctcgttctcttcttctccctttcatgtcaatgtttgaatattgtatttactaaaatctttatgttgttataaataggtggaggacattactgtgcagcgtttgtgtcgtcaacaattgatcactgccgttaatggaaccctgccaggaccaacaattaacgctcgagagggtgatactattgtcgttcacgtattcaacaagtcaccctataatcttacacttcattggtaaaaaatttctcctccttctcaaatcaataatggtatattaaatcatatagaaagcatgtgctacggtaaaactattataaaaaaacacaacttggtttgacctgaagaattaattatatattattgatcgacttcggctatctgcttcatatgtttatatgggttttctttatcgtttcggtacaattttcattccccgacatgcaattgtatatatggtttgttctttatattgaaagaaaaatattgtaaacatatttaagactataaaattagagtataatatatgactagcgaagaatctaatatatatcatctaatatatatatatatatatatatatatattaaaagaaaaaaaaatactgtagcagtatcataattaaacacctgaagaaaattttaaataagaaagtcaaggtaattattttaaaaatctgatatgaatagaattaattataagattaaagaaagtttaacataaaagaagaaaaaaatgtaaagcagttattagaaaaaaatttcataatggttaagtcttgtgtcgatcttaagagaagaatatgtttgtcaaaagaagaaaagaaaaaagaagaatatgatctgtaacaaaaaacagagaagaatatatatgaaatatgtcatttccaaggatgtgctctttatataggatgagtttttctacttgtaaaactaaatttggatatatttttcaatccattatatgcaggcacggtattattcaatttttaactccttggtcagacggtcctgaatttgtaactcaatgcccaataccttctggtagcagatacacatacaaatttaacctaacaggacaagaagggactctttggtggcatgcacactcatcatttctgcgtgctacggtctatggtgctctcttaattcgccctcgaattggacactcctacccttttcctaaagtttatcaagaagtccccatacttcttggtaattttccttatattttttttatatcttcttgttatttgattgcttaaatataaacgtataaggtaggcatgcatgaagaaaaattatttgctaagtatcattaattagttaatatagttaccataaaatatttttacacgaacatttaataagattggaacacattatatcaagtcatcatataattcaacaacaaaaataactaagatattccttaatatatactccctcctgtttttattgtaagaactaaaaaaaaatggattagtatttattataaggtacaatctaaaaaatgtctcgtgcattatttatttttaataaaaaatacatttagttaaagttagctagctataaaatgatagataataagagaaatataattcattaatgttagttagttttactcacatggatggttttgaaaggaaaaaaaaaaatcaatgctgctcgcgagattggttttgaaaaaaaaaaatctatttaaaaccaatttaatattttcaactaaattaaacaattttcttaatctaattaaattatctttacttagcagtacctaattagtagcaatgatttatttgtcgcaattaacaaaaggccttgattctgaaaatcatgattaattgcaggagagtggtggaatgctaatgttgtagaggttgagcacaatgcaacagaatcccaaacggcgccaatcgtctcagatgcgtatacaattaacggtttacccggcgattcctataactgttctgaaaatcgtaagcccttgtccaacaatattgtcaactcttcaacacataatttggctcatcttgtaatattggacaataaattattaaatgttcaaatgatatatgcttaatttttaatttattaaaaaattaataaagtcttatataaagatttgtcgtgattatataatcttggactatattagactgttactaattaatatttcacttttgaccacgtcacaaactcagaaatgtatcagctcaaagttaagcaaggaaaaacctacttgctacgcattatcaatgctgcactgaatgagcaacacttcttcaagatagcaaaccacacattcacagtggtagccatcgatgctctctacacccaacactataaaacagacgttgtagtgcttgctccaggccaaaccgttgatgtcctctttagcacaaatcaacatgtaggttcttattacatggcattcactccataccattcagccccacaagtcagaatcaacaactcaacaacaagggggctggtaatttatgagggtgccacatcagtagaaaagcccatattgccaaatctaccggcccaaaccgatacaccaacggcccacaagttctacaccaacatcacagggctggctggtggaccccactgggtcccggtgccacgtcacgtggatgaacacatgttcatcacttttgggcttaactttgacctttgcaaaaatgtttcaacaccaaatgcttgctctgctgcgcagcttccactctctgccagcatgaacaatgagtcatttgtgctgcctcggggaaaagggttatcaatgcttgaggcattctataacaataatattaacggagtgtacactagagattttccaaatcagcctccgattgtgtttgactataccgaccccaacataacgggcactacagataatgccttcaaaatcgcacctaaatcaacgaaagtgaagacgttgaagttcaattcaacggttcagattgtgcttcaaaacacggccatcctcagtgcagagaaccaccccattcacattcacggcttcaatttccatgttttggctcaagggttcgggaattacaacgccactagagatgagcccaaattcaattttctcaaccctcagatacgtaacacaatttctgtccccgtcggaggatggtccgttgttagattccaagcaaataatccaggttcgttaatttcttcactaaaaatatgtatttaaacctatttgaatagtaaaaataggtttaaatacatttttaattcttatcatgttgttttttatttttatttttaaaaaaattgttttaattcttataaaatgtgtttattttatttttttataaaatattttagataatattttaaataatgaaaatactttaaatagtaaaaaatttattatttaaaatattttaaagataaaaaataaaataaatgtattttataagaattaaaatgatttttttataataacaaatattaaaaaaaatgttaaatttgaacgaaggaaaatatatttaagttcatattacattatgaatattatacatgttaaatataattaattaatactactttctatccattaattaaatatgattgtctacgcaggtgtttggcttgtgcattgccatttggaaactcatttgccgtggggactagccatggctttcgaggttgagaatgggcccactccttctttatcagtgcctccgccaccagctgatcttcctaggtgctaagcgcacgccatacgttcatcaactataccttacattttaacactttaaaaacatttatagattggttaatgtttatacacatacatactttcataatgtggatttctaatatcatttgtttgattgagaaaaaataaggtgtaataaaggacgaaagttaggctattcttcaaccatgtgacttgatggccaattgtactcagtcaaataacatatgttaatttgtcattaataatatatatcttttattttctcgtatgttgtattattttcttttagataacatagttcttaccgacatttttaagtcataatggtgaaaactaattaataatttccaggccattttttcccttgaacgcagtgttgtcaactactacaattattttagctgttacctatcttttttcctatagaatttcaaatatttattatgaaattaatatttaataaaagtttgaaaacttatctcaaaagcagatatacccggccatgaacactgttttgcatcaaagaattacccataatagttatttaaaagttcctttaaatataagttattgttaataatgaactagctcgatcaataaaattaaataaataaacatttaaataagactaattatttcaacgaaaaaggggaataaatactttaactagagccttaaatttctcaattttaattaagaatatcaaaatatataggagtattatgatatatttgtcaataatataaaccatgatgttcttaaaaaaaactaacatcgttatcagtacatgcatataaaataactaactagctagtcgtagaaaatttatataatttcctagtaaaagatatacatcaaccttggcaaagtttggcctttgttaaatttatccccttccactgtgaatttgattgacttcttgaaaaagcaatctcattctgacttttcattacaagacatacagcttacaaatcaagcttgacacgtctgctagtacagcgcgctttactaaattacaatttgattctgttatgacctaattactgtaaacctttaacgataaataactaaataagggttttcatgcaaccttaagagattctttgactttaagatatgatcgacaagtcgcaaactttagcctttgttcagttttttgaatcagataaatatacaattttaataagtatttaatttatcaattagaaagttttttctacgtaccttggagttaaactcttctcacctaaccaaaagaaaataaggatcatgtttgttaagctgcgaggcatagtcagagtcagaggctcatcaatcgatcatagtcaaaatttccggttagatgatcaaaacaagttattgactaagtgttatttattttccccattgaagatattcctacataaataatggtatttagcatgataattattacggatatttgaattgggccaagccaagagaggtccaataagactcggtcaacccattctgttagatacttccagcatatggaacgtggtcataaccatctcaagtagtgaacgcaggagcgttaactaaccaggaatctcggatagaatcatgggacaggatcgtgggtaaatcttcccccaactaactcacaggttaattgttataaatacaggtgattccaggaaacaaggtacacacagaaaactactctcttttttccatttacattgtgcacacctgacgtcattggtgttgtttatacaagcataatgatcttattccctggggtattcattcttcataaataccttctcagagagagaacctggtcatatattaatcacctagctatctttgctggacatttttgttcgtcacgaacgaaacattggcgtcgtctatgagaaagataaatttcaatccccaccagtcacgatggtaaacacgagaagccatcagaacgaagaacgacaggaaccacccactaacgtggttccacatgaagctgtgcaggtagatgatgcagtttcagatactgcttcgtctcttgtccagccaggagtgcccatgccaaataacccaccacacacatcagccgagaaagagcaagagtcaattcaacgcttcattaataacgcgctcgaatccatcttagcccagatcgaatgccttgaaaagcgacatgccctccaacgacaggaggacatcaacaacataatgatgcaattagatgaacgcaacgcaaagtggagacacgacggagagcggcacatacaatacatggagcaacacattaataatatggagagcccagtccaaggaagaaaccttgaacaaaacacttatccaactgtggccgagatatgtcaccaaaccggccggatctcggtacttgatgttgaggtaagtaaccggggccaaacaaccatttcgaacctggaggaccatcccatcactaggcgcgaaccggtgatccaggacgtcgtgactcgcatgttgaggccccacgccaagtcaccaatgcaaacataagcccggcgaagtcgatgcagagcccggttgttgaagcaatacatcagcccaaaataggaggtgatgtataccggaggaaatatcgacgagaacagcaaaataatagcccatttgtcgacgaaatcgtcaacgcttagttcatagaagattttgacgggtcttttctatcaaaatatgatggaagtcaggatccaaaagtgcatatcgacgaattcgacatgcaaatgtgcgtcagaggcattgatgagccaataatctcacgaatcttcgtcaccaccttatctggcgctgctcagacctgattccactcgttgccaccacggtcaatccacaactttgaagatttcggccaaaaatgcttgctaaattttgcaactagcaagaaatatcccaaatccgagttcgcactaaggaagatctgccaacagcctagagaaatgttgcagaggtacttagaccgttttaaagaagctgctggaggagaaggtgcacgtgcatctcttatctactgggctcagcggatcatcccggttagccaaatcaatatacaaggatctggtgaagtctttgttgaaattcagagtacgatccaagaaatatctagagttgcagcagatggagattgccaatacagctcccagaaggaagaattctccttcaaggaaacaccatcatcactggaatgcccatcccggcaagaattctatcccggtttcaggtcggcaaaatatgaaaccaaatatgacaagtacacccagttgaatacatcgcgggcgcaagtgtggagagaagtcgccctgacagacatgaaaaaggtagaccgaccccaaccagtgtttaaaaaggctgggctcgatcattcccatttttgcgaatttcataacgggccaggccacaccactgatcaatgttatgatttacgggatgccacagaaaagtttatccgagaggggtaaactgaggcaatacgtaatcaaaacacaaggtcaacaaagcaagcggaaggccagtcagaatgaggcccaaccacaaaagagccaagaagataaaagaaacaagtgtgacgctgacgaattcccagaaccagaatttgagtgcaatgtgatttctagagccctaggaggaggaggagatacgactagtcaacgaaggaaatatcttaaagaggtcctttctgtcagagagcaacccaaatttaaaggaagcagtagcaaaactgagttccccctactttatttcacggaagacgatatgcaagatgtggtccccgatcatgaagatggcctagtgattaccggaacactagtccattgttggctcaagagaatatttgtagacaacggcagctcagcagatgtcatatcttggaacgctttcaagaagatgaatctggacaaagaggatttgaaaccatgtaaaactgtgttgataggtttcattggtgagaatatcggacacaaaggctccattgaactccgacttacgttgggaacaaaagaggctttcaagtcataaagagtcacgttcgttgtggccgacttctcctcaccatacaacgtcatccttgggagaccaaccatccacaaatgggatatgctaatgtccactaaacaccagaagttaaaaatgttagggagcaatggaaaagtaataaccatccgcggagaccaaaaagaatcccgccaatgttactacaatgctgtgaaagaaagtgagggcggtccatcttctcccccccaaatacgccaaggagaccagatcgagcaaaaaactgatgaatgctgacctaggaaaccaataaattggtggaacttgacatgagagaagatattgaagaatggagaccagagccgaccgacgagctcgaagatattcaaatagtatcacaaccgttgcaaatcaccaagataggaaaaatagctgatccaacctcaaggccgagtaacacaaagtgtcttaaagataatcaagacgtcttcgcatggaaagcctctgaaattccgggaataaatccaaccttctactgtcataagttgtcaatgtatcccggttcaaaaccagtggcccaaaaaaagagaaatctcggtctggagcgtaagcaggcattagagaagtacatcaaagaattgttggaggccggcttcatacgagaaatccagtacaccacatggttgtcgaatgtggtaatggttaagaagtccaatgacaaatggcgagtatatgttgactacaccgacctgaataaggtatgtcataaggattcatatccaatgcctagtattgatcagctagtagataatttgtccggcttcaaattattatcatttatggatgcctttttcgggtacaatcaaattgctatgtacccaggcgatcaagagaaaatggcatttagaggaggcgaagcaaactactactataacatgatgccttttggtttgaagaacgtcggtgccacttatcagcggatgatgaacaaagtctttgcccaacaactcggccgcaacatagaagtatacatagatgacatgatagccaaaacaaacgcgaccagaaatcatatccatgacctggaagagacgttccgcaaactaagggattacaacatccatttgaaaccgctcaaatatgcgttcgaggtaatagccgggaaattcctaggattcatgttgacccacaggggaatagaagctaacccagacaagtgcaaagccgtgttgaacatgcagttctcggtcaataaaaaggaggtacaacaactaataggaaggatagccgtgctgacgcgttttcttccaaaatcaacgaaaaaagcacttcttttctttaaacttttgaaaatggaagccagcattggatggaattcggagtgtgaggcgaccttccaggagatcaagaagtgtttagcctcccctccagtgttgtcgaagccagagcccggtgaaacattgatcttatacttgtcagtaggtgaagaagtggttagcaccgtattagtaagagaaatcaacaaaacgcaatcgctggtgtattttgtaagccgagtgtaaggacttttaatttcggcgcttaaccccgcgcgatagcgcggggattcaggtcagaaaaccctgctaagggtgcggcaccgggggcaccaggattggcgttgatggcgccaaaggttatagctttagaatccttggaaaggtgtttaaaatgtaaattttaaggtggctctggcatatggcgcgacccacttgaagtgtggcgcgacacgcgccatatgtgttttacagggcagatggctctgccatgtcacgcgagtcacttgaagatccacgcgagtcgcgtggcaagtgacccagaaagcatgattttgcactggaactccacgcgagtcacttgggatccacgcgtgtcgcgtggaaggccagaaagtttggcgcgagtcgcgtgatgaagcgacgcgagtcgcgtgggaagtggctcagaaatggtatttctgtctgccatctcaagtgaaacgcgtgggaggtcaagtgagtcgcgtgggaatgtcggcagaccagttttaaaggccaaaaacgtgagaaatgggaggaattaccatttcttcttcctccactcagcccaacctccattgatgattccccaagcttcctaggaccttgttttgagccctaaacacttccctgaaccttagaataatgattgaaccgattagaaagcttgaatccttcatcaatttccttgaaaaccccagattgagtgagaagaggaacctcagagggaaaagctcagagagcttgagcttggctcagaaccacagcataattggaacgtagaagctagaggaagctgatctgaggctgttgggttcgccactgaggtgagaaacacaagtttcaccgtttaattttgattctgggggtctctgtgaatagtgacccatatgagctaggactagaattagcccagggtccagttgagtaagttgttcagggcttagaatagatgaaggattagctttcagtttttgattatgatgactttggattttggctctgtggtttgtctgtgtggcctgtgtgttgtatctacattagtgtagaggccattccagagcctagactatgtctgttatgagcctgtgaggctagttgaatggcacctcgatggaggttaggccattcctgtggttttgagtttgtgaaggctgatgaaataaggccatgtctgttgatgttttgtgatgagtttagcttgactcagcagcttggcctctagtctgaaagaccttgtgaaggtctctgagtagtcccaagtggactgagcttgataataccctaggataggagatttatattgtgatatgttctgtgattgtaagcctgtgggctggtttgatctgagatttcatgtgccttggttaggccgtgagcttgagactgttggtggccagagccacagacctgggaaggagattcagtcagagaccttaccaggtaagttcagtgttctccgggaatgaattcccgttttggttgcacaccacactccgggggagtggtggtcatgattcatactgcatgcattggctatgacattgtgtatgttgatggatatgtatctgcatttgatatatgcatgctgtggttgaaataactgttggccaatagaagaataccagcattaaggagctctgctgtgtattctgggcgttgaggagctccgccctgtggcattgaggagctctgccacaccatgaccggtctgacattgaggagctccgtcagtggcgttgaggagctccgccaggcattgaggagctctgccatctgtcatgtgatgatattatattttgatttgatatgatgaggccagagggctaggccagtgggccatatatgatatgtttgactgatatgtgtgtgtggtgaatctgtgagccagggtgggaatgagttcccggggacccttagcttactgagatatattatctcaccccatgtggggcttgcatgatttcaggtgacacgtctggtcgagaagatctgtctcagggcaggaggcccaattgagactaggttgcttgagggagaagcggcgtgaagagcttgaaggctctgttttgatttattttggtgtatggttctgtataccctcagggagggctaatattcttttggtagcaccacgacatgtgtggtgtggactttgatgcatatgtttgtacagaacttgtatgatatgtatatataactttccctgagtataaatgatgtatttggttactctgcctataaaacctgttatctgtctgtattatgtttgatttgataaactggatcagcaggggcttgattttatggttctgttatgtgtttccatacataatgtatcaagaaaacgatcctatgtttccgctgaattgattaaattgatatttttatacgcttatctgatattattaatgataacacgtcggaggcctacggggtgttacattatcagaagctagagaaagtagcatttgcacttctcataactaccaaaagactccacccataattccaagtagtggttcgaaccaatcaaccaatttggcaaatcttacataagccggatttagctggcaaaatgatgagttgggctattcaactatctgagtttgatataaaatacgaagcccgacatgccatcaaatctcaagctttggccgacttcatgatagaattaaccccaacaataggaagcagtatggaagtatggaaattatacgtggatggctcatccaacatgaaaggaagcagagtcgggatcataatcgagagtccagaaggagtatccattgaacagtcactacagctcaacttcccgacatcaaacaatcaggccgaataagaagcgttgatagctatattaatacaaaccaaggaacaaggagctcagaaggtacatgtgtttactgactcccagctcgtcactgcgtagattgaatgaagatatcaagcgaaaggacctttactggtcaaatatctaagcaaagtcaaagaaataattgttgagtttgatgaagtcgttgttgtccatattcccagagaagaaaacacccgagccgacatactgtctaaattggcaagtaccaaaggtaccggcaatcacagaacggttattcaacaggaggtctcccgacccacttgtgtaatggtgatcttggcacataatcagctatttagagcaaggaacgataccagacgacagtttagaagccaagaaattggtctgagatgctgccatgtataccacaccagattgaaggcaccaatggccagcacatgggagcgaaagccctagcgatgaagaccctccgagccgggtactactggccaacaatgaaggtagacgcctcagaccatgtaaaaagatgcgagagctgtcaaaagcatgccaaaatcgtatggtccccccccccccggccgagttgacctcgatcactgcaccttgatctttctacaagtggggaatggattttctaaggccacttaaggtgacagaaggacagatgaaatggctagtcatcgccgttgattacttcacaaaatggatccaagccgaacctttagccaccatcactcctgttcgagttcaaattttttttgaaagaagcataatatcaaggtttgggatcccggctgaagtcattatggataatggaactcagtttaccgataaatggtttcaggagatgatggaggggttccacatcaagcaccacttctcatcagtggagcatccgcaatccaacggacaagctgaagctgctaataaagtcattctggacgggctaaagaaactaatggacaaggctggatcaaattgggtggagcagttgtattatgtcttgtaggggtacaaaactacaacccagacatctactcaagataccccatttaggatgacatatggatgcgaggctatgatacccgcggaagtcggacaaccctcctggagaagaaagcatgcgctccacgaaggagaggacaacaataatgagacattggccgccaagttagaatcgatagaggaggtacaggctacggcacaccaccgagatctggctatgaaacaactgacaaccaagaagttcaacaaaaaggtaaagtcgaggtgtttcgcaaatggtgacctagttttgcgcagagccgatatcagaaacaaaaatgcccgggatggaaaactagcagccaactggtcacgcggacttggaatgcagacaagttgaagacatattacagctaagagatcgtgaccataagttattcctaatagacctttagttttacattcaagtttttcagtattgtttacaattcatgtgtttctccgtaattgagagtatgagccggggtctattagttcgacacccgtgctccatactaatctctttcattgagatcatgaatttatggttacttccgaagcttatcaataaattttcttgttcctacaaggaaattacaagtgttgtgcacagcacgtgatacctaccgtcctaaacaatgctaaacgtgtagccaaaccctgatcaagttgacataatcaattgttgataatgattatgttacatgttaagtattgcttggatacaaaactgggaaaagtttaatcgggaacaaaataccaacatttaactcgggcaatatcatacttggtcgttggagccaaacgaatacatgccaagcatgcaaatatagttctaaacataacataatacgactgattaaaagcaaattgtacgaatacacaaataaagtcgggaaaaaacccggcaacaacaacaaaacatttcaagacaactacaagcataaccggcatctcggaccttcaaactttatccacctggtcaccaccttgagggcccaaagtctccttttcgccagcaactagaccgtcgtcaacttggaccacggaatcctcctgtgtagagtaagggatcaccttcccatcatgcacatatgacttgaagtgcaccccatccgtgttcaagtcaaccccagaattcaggcaccggatctgctctaaggcgttgttgaaggactcctccgccattgacgccgtcaactcccttaactcggtcgcctccttctccgcacccaggagtttggactcggcctccctagcctctgactgggccccctcaagtagagtcttgacttcatttaaattttgaaccatgagggcaaccttcgtcgaagactattgaagttcaacccgtgccccaagtgcctcttcaaccgcagctcgcagatcttgttcaagcatctcggacctgtgccgagacacacaaagctcttcagcggcagcggccaaactttcccgggactcatcctgggatgcggcaaactcctccttcgtcttaatgtaccttgactttagagtaaccaagctctgaacaagagaagcacacccgaaggcatgaagttgcatctgatcgagctcatggaggtcatcatcagaaaatggactcgagtccgacaagtgcttaggagctttgacaaaggggaagagaccatcgacccccctttcccgaaggcacccggacgccagtataggaacttcagaggccggggtcgaatgagcatcacccgccagcaggccagtgacgactgcactaggagtggggaaacagtaggagtcggggaaggaattgagagagccgacttgggatcagcgaagccacatcgacaggtgcctcccgggcaggctccaaaaccttcctcctcttggcctttccgccacctagaagcgaggaggacggctggcagtggtcggcctaccctgaccagaagctcgagtcgaagagtcgggcaccttttgagaacggggcaccagatcgacagagtgatcctccatgtcagcagctacaaaaagaaagaagacataatcagaacaatggaaataaataagttaccaaactcaaatatatcacaaataggagcccggactgacgttggcgaacaagggacacaatacgaggcagaccctgagcctctctgtatgcatcaattcggattactgaggaggcatccgcattcgatagacttgtttcctcaacttgataagaggctggaggaaatttatggtgggcatgggtccagtagagtgggtatctccactttacttcgggagatttcggacccccagaagaaagaaaggatgtttgccgagttcgacaacaaccttgaaataattattcttaaaattttgaatgactctgcgtataccaggaaaagcttgcggttggaacgactcctaatggatgttcatcccttcctattcgggggttctcggccagtccggcctgtatgaacattaaaataataaaagaaaacgggcacagtacaagggactcccaagtttacacacaaatcttcaaatgattttataaaagcctaactattagggtggagctacgaaggagccaggcgcaaatgcttcaaaagctgcatttcaaaattcgacaatgggaaatggacacttagacgggtgactacgtctttgcaaaaaaagaagaaactatgttcacccttcccggcaaacgagcatatgggttcatgggggccgagagggcaaatagagaacccctcttgactcccaatggggagcgcgacaacgctcattagacccaaaacggaggagttattaatacctcataggtgacccaaggaaacttagaaattaaagaaggagaaggacaatttgactgagatccggtcgactgtgacccctctactatctccactaacggggaatccataattacctacgacaaaataaaaagcaacaatcagtaaagaatacctggacaaacgacgacaaggcgagaatcaagatttgatgaagtgttagccgacaccgggttacggatggtgtctctaatggacttagttctaagggtgaagaggactttgtgacgggtaaaactggaggggaacttgaaggaatttcggaggaacccctagacctagaatcagaacctgctacaacctttggcgacaaagaaagtttagtttgaggcttctttgaggttttagagcccctagaaggggaacacagtaaccttttggatttctcctcttctagaagagggaggccaaagaaccaaaatgcagaactagggaaaacagttctacatatatgcgcttcctctttaggagtaaatcccatcttaggagactaaaatgggactcaatgcgcaaggcgaacaaaggagaaaagaaaaaacaaataaagaaaagaaaagcaagaacgaaagaagaacgacgaaacctaggaacagattaaggagaaagaaatgtgtggagccaaaataaattgcaaccaaagcaattataatgaaaaacagaagcacgaaaatcccaaaatacaagtacgagggaaatataagatacctggaatggaagaaatcctgagggaattcgagcaccaaaggcggagagcaaaagtcaatgccaagatcgaaaggaagcagaggagaagaaagcacaggatgagttaccaagaaaaaatggggaaaaagagaaaaaggggacctataaaactaaaaagaaagataaccaccgaaacacgaagcgcatggagtaggtaattgacggacgtgactagtcacaaaggggtaaagacgtctaactcaccagaaagtgggggcaaaatagagagcaattcaaaacgctcatgattaaagcgtgcaaagaaatgacagagcattaaatgatcgggagacttgtcgcttccaatgcctgaacaataatgaaaacgtttcgcttccctaagaggttagaagtcgaaaaataggtcggctatatcaggaaaggtacaaggggagaacccgacaatagttataccacgacatcaacataaacatgagcccggaaagacggaagtcctggaatcaaaagtaaatttattctgaagcaccccggccagtcagactcccaaccccgagatatctatcctggtatggagccataaaattataaggggcatagaaagaggccatcaagtaatttcgtcctagccgtccagaatgcttgacaatcgggctggggggcatctgttacggatatttgggttgggccaagccaagagaggcccaataagactcagtcaacccattctgttagatatctccagtacatggaacgtggtcataaccttctcaagtagtaaacataggagcgccaactaaccaagaatcttggataggatcgtgggacaggatcgtgggtaaatcttcccccaactaactcacaggtcagtggttataaatacaggtgattccaggaaacaaggtacacacaaaaaactactctctcttttccatttacactgtgcacacaccttacatcattggtgttctttatacaaacatagtgatcttcttctctgagatattcattcttcataaataccttcagagagagagaacctgatcatatattaatcacccaactatctttgttggacatttctatttgtcacgaagggaacaataacgataagtaatttacttcttcaatgtagcgaaacttcaaaatctaatgtcaatatcacgttgcaatatcataattgcatatactagaaaacacgtaatcatgctaagttaagtctgaagtagtctcaggagtctatatatagtactctaatttttgcttcttaatttgcttgattatttcatttatcactcacgttcttcaacatgaaacgttttgtgtttgctttggcctgggcttttgctctttttctagcatgttccttggcttctggtgctgttgtggaacacactttcaatgtattggctcctacatccttctcatttactttgaatactgatagatagaaagatacaatcattgcaatcttgttattacaaaatgaaacattttatatatgttttctctagcttgggcttttgctcttatgcttgcttcttcaatcttcattggctcacgttgcgtttgaggaacacactttattttttaattttttttaattaccataatatgaatctttaactcttcgtcgagatcttgagcatctctacaaatttcagtccttgacttaaagctcttcgtttttcactgacttttttcgttttcctttcatgggctattggttcatgcttgtggcatgcacttttattttttaatttttttaatcaccataatttggatctttgattctccagtaagatagatcttattattttcacatgtttcaatccatgacttaaaactcttcctccttctacaatttattgttcttccttgcatgaactattggctcatgctacgtttgtcaaacacacttttatattttcatttttttttaatcaccatatgtaactttgattacgacttaatcatatttaaaatttattatctttctccggtttttcgatttttctcctccttttcatgggctaatcaaattaagtttgaaatatattcactaattaaaatcttatattcttatataaataggtggaagacattattgtccagcgtttgtgtcgtcaacaagtgatcactgccgtcaatggaaccctgccaggaccaacaattaacgctcgagagggtgacactgttgtcgttcacgtattcaacaagtcaccctataatcttactatccattggtatactttttctcctccctctcatatcaataatgaaataatattaaatcatatagaagcaatgtgctacgataaaaaactataataaaaaacacaacacgacatattattgacttctgttatttgtttcatatgtttatacgcgtttttttaccgtccaatttcattcctagaatcaaagagtttttttatcaattaaaagtcgaccatccctctcatttatcttttaatatttaggaaattcagtcttaagtgttgacgtaaattagaaacttgaaacatatttgctattggatttttttagaaaagaaagttaactgttatgtgttatcataccacaaaataatatatctatatctatatatatatataaggtagaatcttaagaaaaatattaaattgaaaatttaaaaagactttgtaaggatattgaacagctagctaattaaacaaaatttatattaaaattcaaagcagttatttaaaaaatataagcatatgataattatatatggagattaaataaagtttaacataaaagaagaatttttataaagaaattattaacatttgagaggtttttttttttattcatgaaaaagatacaaagaaactcaaactaaggaatcctaaaggaggaatttcagagtggttaagacctgtgtcataagagaaatttggatatttttgtctacatgtaaaaactaaatttggatttaatttacaatatattatgcaggcacggaatttttcaatttttaacaccgtggtcagacggtcctgaatttgtaactcaatgcccaataccttctggtagcaattatacatacagatttaacctaacgggacaagaaggaactctttggtggcatgcacactcatcttttctacgtgctacggtctatggtgctcttctgattcggccacgactaggattctggtacccgtttcctaaagtttatcaagaaatccctatactacttggtacttttcagttttcatcctcttgattgatttattttttctgatttttttgttgttattgatgtgactcatgtaagatatctattcatttttaatgattaattttgtgaaaaaattggttaattatctatagtacaattttctcttttttaatcatatttttttctttaatttatgagggttaaacccaatactttaatcaagggatttgaactcattcgtccactccagagttctaaattattatattgtattttgttatttgattgcttaaatctgtacgtatctatttttttattatcaagtatcttaattaaacataggcatgtctgaacaattctttccaagctagtaatgatttatcatatataaatactatttataatattttttaaaaattgtataagctttgctattttagggtatataagctatgttaagaatgcaactattttaaaatgacatgtaactactaagaaaaaaaaaatgtatagtatctaaataaataaatattttttaaagtaattagcaattgaaaagtcgatatccaacaatattttagttaatgaaaaaataagctatttataaatattcttttaagagtcataactaaaattcaaaatcaatctatacgtgagtagaaaaaaattagtttctaacctagactctaattattgaatttataacaacaattttgtaacttttttgttgtaattatattattaatatgaagtattaattggttttgctgatgatgaatctccgtcaaaaaatttagctggtcacttttagtgagattctttcttctaaattacatttttttatccacaaaactcaaacttgatattttacttaaaaaatccaatgacttgttagtataatagttgatgtacctaaatgttaatagcaaaaaacatttgtgaaaaaattgttaatagaaattatttgtggcaattaacaaggcattgattctgaaaaccattgtaggagaatggtggaatgctaatgttgtggaggttgagcaaaatgcaacagaaactcaacagccgccaattgaatcagatgcatatacaattaatggtttacccagcgatctctataactgctctcaggatggtaagcccattgctcaaccttcaactctcatatatatatatatatataaactaacatgatatattgtcaaaccttcaactcataaattgatttatcttgtattagatgaaaaattataaaatatatttcaatcgatctcaatgtgacacaaccacatttttttgttaacttttcaaataaagattggtgaagaccataaaatttcggaaaatttaacaatgatatgtaatacttcactttttatcatgtcataaactcaggaacgtaccaggtcaaagtaaagcaaggaaaaacctacttgttgcgcataatcaactctgcactcaataatcaacacttttttgaagtagccaaccatacattaaccgtagtagccattgatgctacctataccaatcactacgacaccaatgttgtagtgcttgctcctggccaaaccgttgatgtcctcctaacaacaaaccgaagtgtgggttcttactacatggccttcactccataccattccgctccacttgtacaaatcaacgccaacatgactcgaggagtgataatttatgagggtgccacgtcagcaaagcccatcatgccagatctcccggcccaaactgacactccaacggcccacaagttttacaccaacatcacagggttggctggtgggccccactgggtcccagtgccacgtcaagtggatgaacacatgtttataacttttgggcttagctttgacatatgtcgcagtgcaacgggagtttgtcctgggccattacccttattttctgccaacatgaacaacgagtcctttgtgttgccacgtggcaaaggggtatcaatgcttgaagcgttttaccggaacgatgttactggggtgtacactagagattttccggatcagcctccggttgtgtttgactataccaacccaaacataacaacgtcgccagatacacctcgtgaattcctaatcgcacccaaatcaactaaggttaagacgttgaagttcaattcaacagttcagattgtgcttcagaacacggccatcattgcggcagagaatcaccctattcacattcatggcttcaattttcatgttttggctcaaggatttgggaattacaacgccactagagatgagcccaagttcaattttgtgaatcctcaaatacgtaacacaatttctgtgccggtcggaggctggtccgtcattagattccaagcaaataatccaggttggttaatttcttcgctaaaataattaagaattaaatatgtttagctcttatcataaattaatatttatgataagttttaactctaactctttaaaataactattttataagtcatgttttacgtctgattgattaatattataaaatttcttatattaatagtgcatacaaactaaatttattgaatatatctttattccatccaaataagatatataatgcccactattacttataaatgtatttttaagtattgatttatgaaaaaaatgcatatatattgacaacttaaataattttttacaaccaattgtgatttttaattgattgacaatataattattgtaacattagtgatacataaattaagcttgatggaaatatattatacaagggtccctatttctataaattaaaataaaaaaagacgacaattttttaaaaaaagtatatattacaaaagagattaagctaatacttcatatattaattttataatatatatatatatatatatatatatttcataaagatttaaaatgtatttaactcaataattgaagtaaatgaaatttcaaattatcagctattatgtacgttaattaattttttctactcattgaacatgattgtgcaggtgtttggcttgtgcattgccatttggaaactcatttgccgtgggggctagccatggcttttgaggttgaaaatgggcattcaaccagagtgcctccgccaccggctgatcttcctaagtgctaaacgcatgccattcgttcatgaactatataccttacattttagagtaaaaaaaattatagattggttagtgtttatacccatattttcgcaatgtgggtttctgatatcatttgtttgattgagaaaaataaagtgtaataaaggacgaaagttacgctattctttcaaccgtgtgacttggtagccacttctctgaaataacatatgttaatttgtcattttaaaaacacttttttttttttttttctcgtgtgctgtctaattgttcctttagatgatatagttcctaccgacataatattgacacaataaagtttacgtatagcatatgtatttcaagtggctatataaataatgataaaagaaaatggctatataaattaatggacaaataataaatttaactttataaattaaattgtagtgtacccttaattttaagagtgtttaagtctcttaattagtttattttttcttaaaaaataacatgttattataaaattcattaactccttttataatattaagtatattctctcttaaatattattttatttgtatttttatacttgaagttaacaatacacgcactatagattttactaaaaatattgtaatactcatttatgtcacgtacatacgtatcaaaactaattaataacggcttggccattttttcccttaaaagaattgatgtcaagtgttttattaggtgttaaatatttttaatagaattttaaacatttattgtgaaataaatatttaataaaagtttgaaaacttaccttaataccatatatatatatatatatatatatatatatatatatatatccgtccatgatcgagctctattcctataaatgagtttttgtttttttatgaatctataaatatgagttatagttacactgaactagctagctcaataagataactaaatataaattatatgactaattattaattcaacaaaaaaaggaacaaatattgatattagaaccttaaatatgtcagttttaagaatatagaattttttatgaataaaaataaaaaataatattaaaaaatttataatattcatatattttgttcaattgatccattgataagaccatggaaattatttgtcaatataaacacataacatcgttttcagtattgacgtatatataaaataactaaaaagtagaaaaattatattatttccgtgaataagatcgatatatatcaacctaacaacctgcctcagtttcgcctttgttaacttttccccctgtgatgaatttgcttgaattgttgaaaatgcagccacgtatattctgactttcattgccaagcttgacacgtctacgcgcttactaagttattacttgattctgttatgacacagaacattttactgagttattacttgtttctgttatgacattgaacattaacaactggcaacggtaaaagttcccgaaatttgaaatcaagaaaactaaaggtattgaaaaaaatataaataataacaataactaatatgatgtaacataattgataaatgacattttcttattgtcttttaagtatataattacaaggattcaattctcctaatcaatgtgcttgaaaaatatattgtgaaagattaactctttaaataaatttcaatatatttcaaaagattaattcttaatttttggtcaaaaaatatctttgtttacacaaaaaaaaaatataaatatcaaggatcaatcaaagattctaattcaaataattgaacaatatatataaatattataaatcttttaatatttatctttgatttggataaataaaaatataaataacaagggtctccatgcagccttaaccaaatgttttttcttccttggagctaaagttttctcaccctagaactttaaccaaaagacaatatgtgtcatggttttttagccgcttatagtcagagtcagaggcctacctatcacaatcaaaattgacggtaagatgatcaaaacaagttattgacttagtgttattcttctttttccctttgtagatccttcggatatgtcctaactaaataatcatatttagcatgataacgatgatttccttctccctaatgtttcgaaaattcaaatgcttatgtcaagaccccgctgcaatatcataattacacatctatctgtattataaaacaagtatgtgatataaatttttttatatcgtattcaattttactgataaaaataaataaatacgtgctaacatgagctctcagatatagactctaatttttttgcttcaagacaacagacatataaattttgcttgatttatttcatttatcggcgttcttcaacgtgaaacgttttgtgtttgctttggcgtgggcttttgctcttttgctggcttgctccttagcttctggtgctgttgtggaacactctttcgatgtatgctctccttaattccttcttctccttttctttccttataatatatgctaaattattttgctctctcataggtttaatttagtctttttttaatttacaaaataatcttttatttattaaaagttataaaatggcccttaagtaatttttttatagcatctttactcttaaagtaatgtcttcttaattagagttttttttttttaataaacttgctacaaaaataaattatttgagggatcattttattgtttgtttattttttgttgcttgactaagtcaaaatcacataaggtggtccactcactttatcttcttaagaataagttgttgctaatcttatcagtaaaaatttcaatacaccatcagtgagtgatactaaaagcatagaagatttttaagccaaaagttagattagtttgaaaactcaaactgtttacagattacttgacttcggtattgtaaaatggttgaaaaaccattgggtttttatttcgagtctgttggtcgcctgtatcgatttgcttaagtcgtcttgagatcatgaaaaagaagtaagtaataggcgccttatcacagtgctccactaaagtggtagccaaaccaatggctaaatcttcttcttcttcaaagtaaaggtagtcgaagacttttgatctcgaacccacgtcctaactatctgttatatgcttatgcgttcctgtttaattttgaaatttgtagatttatgatttgttttatacatgaatatattatggaaaagttaattctatgcatatatatatatatatatatataaaatcaaatgcataatattatgtttcaattatgcaattatatataagaattttatttatcattatattatatattgatcttgaagtgcataatatgatttattctcatatgattacgttttatgtctaagtgatctttataattttaattaattatggattagtcacaatatctataatttaattaaaattatatattaagttatttaaagatcatataaggaattaggcataataacccataaccaaataaatgattataaatcattttgccaattgaactaatgacaattttgtggcatatgttcacatgatctattgttattctgtcattacatgtattaatttatgtttccctatacatgtaatattaagttgattaatctgaatgattgattatttaattttattgtttatggttaattacaataaaattaattttgaaaattatataatatttagtgatctttataatttaattaattaaaacctagtcacaacaattttaattatttaaattatatattaagactctttaaatcacataaggtagatgatattaattgtaattaatcataatataatatagtagatattatcccacaaaaatttctattatatttttgtataattaattaggacaaaatattaaattatatttttttatttgcccatagggatcaagaaatataacttgatagttttatcataatgtttatgtgagtttaattgaattaaaattttagcccacaggcaaattttatgtcactaaattcataactttataagcatgctatattggtaaagcatgattcattatttttgcctcgaattttcatgataagcatatatgttgaattattttgcaactatacaacctattaatataattgatgtcctggaattgagaggagattatttttctatatggaaggaaaagattctgctaacgatagggtatataaacattgattatgctatcaggaaagctgagccaccaacaattatagagaatagtgaaccagaggagatggatctatataagaaatgagaaagagtcaaccgactctgtgtgatgttcattaagactaaaatatcgactggtattaggggttcagttgaacagtatgacaatgtgagagtgctcctgaagtacgttgatgaacaatttgagacttcagggaaggcattggccaataccttaataatgaaattttcttccatgaaactcaatactctgaggggcgtgcatgagcacatcatgcatatgagggacattgcagctcaactaaaaactctaaaggtggacatgttgactcctttttggtgcattttattctgaatactctcccagcaccatatggtccctttaaaatatccgacaacacacataaagacaaatggtatattaatgaactcatgaccatgtgtgttcaggaaggggggaggttgcagttgtaacaaggagagagttctcttatgacgactaaaaggaatggcacatgaagaaagactgtcctaagctcagttcaagctattgtttggaaaagaaagatatgcctacctctttagtttgttatgaatctaatatgattaataataacacatagtggattgatttgcaatatgtttttttttatattaatttgcaaaatgataccacttatgatgctatacatgttaatgttggcatgaatcgatgtgttataatgagcattcctctatgttgtggtacctaagattaggacacatctctatcgagagaattaagagattggtaaatgaaagggtacttagtgctttggattttgctgattttgatacttgtgtagattgcattaagggtaagcaaactaacaagtctaagaaggtgcaaagaggagctcaaatctattagaaatcatacatacggatatttgttgtccagacataaacacaagtagtccaaaatactttatcaccttcatagacgattcttcacgatatatgtatctatacttcattataaagatgaagctttagatgcctttaaagtttttaaggccgaagtagagaaacaatgtggaaagcaaattaaaatcgtggaatctgatagaggtggtgaatactatggtagatacacggagaatggacaggcacctggtctatttgcaaagtttcttcaaaaacatgggattgttgcccagtacactatgcttggttctccgggttagaaaggtgtggtaaaaagaagaaactgaaccttaatggacatggtgcaaagtaagcttagtagttctaagcttcctaagtcattgtggactaaagcactgaagaggacaatgtacatattgaatcgagttccaactaaggttgtcccaaagacatcatttgagatatttaagagttggaaattgagtttgcaacatgtacgcatttgtggatgcccatctgaagtgagaatatataactgttgcgaacacggcaagtgcaccgctcgtttcaagtaataaagtgggtaagtagagtatcgtctccacaaggattggagtgaaattcacagtaatattaagtctaagtgattggaagtaaaagaaataatttgtgaagagttgttgttgtgtgttgagtgttgaatataaagaacataaattaaaaagaagtaaatgtagtgaatagtttggggttgttaccaatggaatgaatgattgtggttaggcacaatcccctttgatccctacctccttcacttaactgattattaaatttaattaattctgtttactcagagaataaatctttcctaaattagttaatccctaatcccttagcgaattaaccctttaacctgaatcgaaaacctaatcccttagtgaattctatcaaattaagcaattgaaagaatttattataaggttctgcaggcatgcatccctatccctaggtaatgaacaactgttaatttattcatgtcagaaattagaaccccaatgtccccattgcgaatcctaacccttagcacttagatagaatgaccaattctaaacaagaataaaacaatgaacaacagaataaattaaagcaaacataataatctcatgcaataccagtcaagttacagaggagttcacattggttcttggcccaaccacaattcaaggtttagcctgacataggcctcaagaacacaaaagctgttgaataatacatgattctactgcaaccctagccttgattcttgatttccagaggtttagaatgatgaaatatgatgtgtaaaagtttctccggatgataaaaggttctttcttcagtcctagagctttgtatttatagatgagtttaattggagtaacaatgcctaaaactgtgccaattttcgaaacagataactttaaatcaggaaagcaaatcttcacggcgctgatggcgcggagtcccgcgctgatcgcgcgagcctttcgaatggatggcgctgatagcgtgaaactccacgctgatacgtggagtcttcgagttggaagcctgtcttgagcaattggcgcgacccgcgccgattctggcgcgatccgcgtgaaccttgcggcttgatggcgctggtagtgtggcccttcatgctaatagcgtgacctgttcgagatgaatggctggccttcaaacctatggtgctactggtgtgaatcacagcgcgacttgtgcggcttattcgaactgaagcttgttattttgcatgtggcaccactcgcgcgggatctggcgcgatccgcgcgagtccttgaacttagttttcttctttctttttgcttaattctcctctttttgccctgaaatcacaaattggtaatgagatgaaatcaaatggaatataaacaataatttaacttattctattctattttcctaaatatttaattaaattatagcttaaaactagcctaaaactaagatgtgtttgcaacacatcaataacccacgagagaagaaacttggctcaaggaccactaatggatacttcattggatatgatgaaaggtctaagggatacagtttttactgttcatttcatagtacaagaattgtggaatcaagaaagtttaatttcttgagaatggcttgattggtttgagcgatcaatctagagattttgtttatgaaaaatatcattcatttacttaaccattcacttcaaatcttgaaaaataataggaatacccacaataaccaagagggggggtgaattggttaaaacttagtcttttaaaatttatttatcaaatcagagttaaggatctttatcacttttaaaatcaagaatgcttttactcaatcaaattactcagcacaagaaaccaatagctcaaaacagaacttgttgggtaatgataatgaaacaataataaataaacaagatgacttgtagagatagagataaagaaaatcaacacaagcaatttatacttgttcacttcacaacagaagctacatccagtttcttctaatcaacactagcttagagttccactattataaatttctgttcttacaagctttacaacaacctccctttatcaacactagataaataatagaaatctaaaaacctattagacttctaaaaagtaagaaccagagaacactactctgttctttcctagagaacactactctagccaaagcttcaagaactcacttactatagcatcaaataacataaattccaaaacaaaattacaatcaaagattatggagagaaacaacctgatgatccaatgaatgtgaatgcatatgaattaccaatcaaggttgaatagcagaaaatagaatttcagaacatgctctccattaaactcttgaagtttcttgcctgaaaatcattcaatagctcatgatgattaaagagtgggacaagaagttagagaacccaaaaaatcactttcaaactcttagaaggcttgtgtatgctcagaaaatacgaagtgttcaagttggaaaacaagccaagccttccttctatttataacagaattttgtaactacttataatcgatttcacgctccaggtaatcgattaaaatgcatatgtaattgattaaattgtcacttaatcgattaaagtattcaaggcacattctgggtttcaacaacgaacaaaataatcgattaaaccaacttgtaatcgattaagtcagaaaagagttgtttcagaaaatggcctgtgtaatcgattacgaataatggtaatcgattaaagcaacaaaacagactttttcaaatggcctatgtaatcgattacgaatgatggtaatcgattatcacagcaaggcacaaaatacattttacactatgtaatcgattataacaagtgtgtaatcgattaaaacattcaccaaagctttccaatttcaaatacgagccaaataatcgattaatccgataggtaatcgattaaaatgttcataaaagctttttccaattttaaacatgaactgaataatcgattaatctgttatgtaattgattaaaacagtaaaattatatttttccaaaaacattattcaattaaatcctttttcaattagtgagtagctttaatgtttttatgaaaatcatttaagcatgttaatgagtatgtgaatgcaatgcaagggtcaaaaggttgccttctcctacacttcattagaattacaatcttcaaggcatgtgaaaagctcaaaacaatcttctaagtcataggcttcattcttcatgttgctccccccatatccaacaaatcttagattggttgttattaacaatacccttctagctcaaccgggtgttgtgcaacctatcattcaagatctataacctgttgataatctagtagatcaagatgttcatgaggagcaagaagaaattgtttatcaaccaattgaacaacaagttcctcaagaagataatgaaacaccattaaggagatatactagaataaagaaatcaatgatactgagtgactttgttgtgtatctataggaatctgactatactattggagctgaaaatgatcttgaaatgttttcacaggccatgagttctaaagaatcaaactagtggtatgatgctatgaaagaggacatgaattctatggcattgaacggagtctgagatcttgttcagttgcttgatggtgcaaaagccattggatgtaaatgagtctttataagaaagacatatttaggcaacattgagagatataaagtaagactcgtagccaaggaatttaatcaaaaggaaggaatcgactacaaggagacattctcttctgtatctaagtaagattctctttgcatcattctagcactggttgcacattttgacttagagttgcaacaaatggatgtgaaaatggtttttctcaaaagagacatagagaaagaggtttatatgaaacaacctgaaagattctcctctactaaggatgagcaattggtatgcaagcttaagaaatctatatatgaaacaaggcttccgtcaatggtacttaaaatttcattaagttatttcttcattttggtttcgtagaaaatgttatgaatcactgcatataccagaaggtcagtgggagcaaaatttgtttccttattttatatatagatgatattttacttgcaaccaatgacaagggtttactatatgaggtaagcaatgtctctctaagaactttgatatgaaggatatgggtgatgcctcttacattattggtatcaagatacatagagacaaagtaagatgtgttcttggtttgtctcaagagacctatattaacaaagttttgaaaaaacttagaatgagtgattgttcaccaagtgtagctcccatcgtgaagggtgacaggtttgatttaagctagtgcctaaaaaatgatcttgagcgggaacaaatgaagaacattccttatgcttcagttgttggaagccttatgtatgctcaggtctacacaagacctgatattgcttttgcggttggagtgttaaggagatatcaagtaatccaggtttagaccactggaaagttacaaagatagtgttggaagtaactggctactcagattcagattaaactagctgcgttgatttgagaaaatcgactttggtatatatttttatgctagccagtggagctgtgtcttggagaagtgtcaggcagaccttaattgactactacttccactatagaggctgagtttgtttcttgttttttgaggctacctcaaatgatgtatggataaggagtttcatttctgggcttagagttatggattccatttctaggccattgaagatatactgtgataattcatatgttgtttttatgactaagaataacaaaagttatagtcgaagcaaggacatcgacattaagtatctagccataagagaacgtgctaaagataatatagtggttattgagtacattagcactgaattaatgattgtcgatcctttaactaagggcatgccaccatttaaattaaaggatcatgtataaaggatgggactcagttcccatatgagatttttcattataagaatgatattaagaaactctattgtgaagtttttcattcagtttatgcgcatctacagttgtttattatgagaaacattcattaagtttggtcctagaataaacattgggtttattcattaagttatatgagcttgagaaatataatgtaatgtaatacatggaagatactactcgtatatattagaggaactatcgccatggttcatgtattttatttctcactaaagtgtatgttgagatatgtggaccaggtaggagaatgttggtttattttatgttgcttgactaagtcaaaaccacataaggtggtccgctcaccttatcttcttaggaataagttgttgctaatcttatcagctaatcttatcccttattttaagcaactatgcccacgttttatgcatatcaaaaaacaacctctttgataggaataggttataaaaggagatgtgtaccatggccaaggtccttgtgcttgctatcaataaaaatctcaatacaccatcagtgagtgatagtgaaagcatagaagatccttaagtcaaaagttagattagtttcaagactcaaactatttaaagattacttgactcacggacaactacgatttcatcttcggagcaaacaagaatagcaatggcaggaggtatttattatcttaattttttttccgcacttgatctaattgcttatgttgtatgtgtataagcatgattagattatttagttttttcttaaatttataacttttaaaaaataaaggatgacattgtagcctaactaaaataaaaagggacatgtgaatagtttaacttaaatattatatatataaatagatatttaaatatagatataaatagaaagacatacataaagaagatgatgtttatgacaacattattagaaacgataactataaacttatatcatacaaccatacataaattaccaagttgattacatgttatcaatcatgactatttgaaaagtgagcatgtgtattttttttcgttgttctctttttaattattctcatttcatgtgaaaattctgaacggtaataataaaccataatcatataaccatatataaattattaaaattaaaagttaattaataatctcatttgaaactatctttttatctatctaactatatatttaagaggaatgttaacaatacttttttttacatcttctctatattgacgtaaatttattagaaattacaaattttattcacttctaaatcaaagaggtaattaataaatgagaaatgagacccaccaacatttgtatttcctataaattttagtcaatcacaaaaaatgcgttataaagagaggatgagggaaacactactacaaaacctgccttctatgacgaccagttaaagatgcttgcgtaaaacccgtcgtggtatcaagtgcggtggtgtttttgtaaatacctgcaacttttcaaagacggttctagggtaaccgtctttgtattgttggtacgacgatgtttatgtgtaaaaccaacgtcgtattactataatcgtagacggtccaggaaaaccatctttgtataggaagtaaaaaatgaaaacaacaacatttgggaatgaccttggaccgttgtggtttgcaatggactgtgtgaagtaaatagcgactatgtttaccttcgaagacctcgtcctgccctatcctccattacctcattcactccatcatccacctttgttcgtaacctccgtgtctctcacccactctccattgcaggctctgtcactccctcagctggtgaccgtggtgacctcgctcactcccttaacccactctgtcatggtgggctcccatgggtaacgccgttgtgggctctagtgtgtaacctctgttggaaactataagggtaataacaaaggtgccatgttctgtctttgttatccccgtttttgaatgttgtcttgtgtagttttttacttcattaagtagaatactagtatagtttcttttcatgctcatactagaatcttcctacttcctaggcttcaattagattcaaagagagaatttttataaaggaaaaaaatatatcctttcatttccagatgccacaatgactaattggagaattattggtttgtggataagtgttgactgagtaatttatgcttacataggtatcagacaatatatgcaaggtgagagaatgtgtaaggtctgtacagagaaatacaaatgattagttgaaatgaaaattaaaatcaaggtgtgtttcaccacatccactcccaagacaagccatcctcagacaatgagccaacctctaaaaaccaaaggaaaacagttcttttattatctttccttccttcccctttcttgcatatgaaacagagcataaatgtattgtatgacactatcacactagtgactatgactatattgtaaaggaaaaggtttgcttatccatgaaatttgtggtgccacattttgttcctttcttactctaatgttaattgtttatgcgaatcattggccgtttgcattatcttgaacatagttaacatttttgtgttttggtatcttctttgtttctggtattttaggatgacttaaaaaccagtagttttccaagcagcttattacagatgtgaatattgttgttgcagttgaagctgtccagactattggcaatcttactcgtggattaagaactcatttttgtgcaagttctcattttttattgtctgttttacttgtaagtactattcagcagtcacatgtataaggggttaacaactaaatgaattttactaaggggtctttaaactttacatgtcttatttggtcgtgttacatgtaacagtgttaattaacatgtctttctttcatgcaataaagtcattctctattttaaaatgattgctgaactgcaatggctttgagagagtttggtatttctaattttgaattgctcatcactttcattaccctttttgttgtggtttttaaagaagcaattgattttggttttgagaaagttgaatgtcttcttttgtcttgattcttgaatgcctttagaggtgttgatatagagtttaggtggggaagagaaagaaacagaaagacaaagaaagaaagggcaactgtgagaagaatggtagaacaaaaaggatagagagaaaaaagaaacgtgtattagaaactctgcaatatctagattatcataatatcatttcattatgtttccaacacaacaaccctacttcatttatgggcagctaccctgcagctatatactaacagtagctgagtaactaactagctaacatctttttcttatttatatttatgtatcaggtgtttttatatggcataaaataataatttactattctccatatattggtttcataatatctttcttcttgaatgaataggaaaaattgaacgagaaaaaacctaatttgcctgaggcattgatgcagactcttcaaccaatgcataaagttggatgcatcagccttatagatattgttgaagagaggttcccctccttgttttttttttactgaattttatatagtgttgtatttgaaaggctacaggttaaaggatttaattactggatttaaagaatcttagaatctacaacatacttttctctaatattcccacattaccatgtcttgccctttttggtgtttttcttactgaagtttttagttcctaaactaaagatactaatatctatcctatatcactgtctgaatgtgggttattagcctaactcaaccctacaaaatcggcttgtaaggtgacgattgcttcccacttatatagtctatatcaacactatctttagttgacgtgagacttcaacatgtccccttttgtccacgactaccctccatgtgggactttcactccccacccctatgtaggagtgaccacaatttaggtggcttttccaacaatcaccaaaaggatttagtggcatttccctctacagtttgaatcctcagcaagacatgatgcaaaactccttcaataatttcctactgttatttagtcataaatttatattggttctttagttacttgtgtgaaacacaacttaattttaatttgcatttcaacttatcatacaatacacgctaatctaatcatgtgcaaggtcgtctaatactaaggcttataatttttatgcatgatttgatatacaaaatattacttatcaatattcttttgtccattgttaacaattaagatgccatgcatcaacttcctcacactttctgctttgtacttgaacaagcatattaaccatatgaaatagtttggtactcatgtactactacaagtgcgtgtgcaacatattgtgccttgtgcatgtcattatacaaacttgagttttgagtttgaatagtgatgaggcattgatttgtgtgattaggcaaaccccaaaccattggttaatgccaatagaccataaaataattgacaaacaattgaccaacaagtgtatcttttcaactaaacttgaagaagttagaatagtgtaggccatacaagaattaaattgtgccatctcttcagcttcaggcaataaaaactatatacacacgttaaaagcatagacccttgtaaatgatattccatgtttcctatttcattttcaatcattttcttcgtaactgttgcaattttgatgctggttatttagtattgtgatgtgtgttgaggctaattgtccattggacaatgttgcacagttctaaaattttgacaaattttgtttggaaaagtgctgattaaaccataatggtgagaatggcgtgtcttattcctaaaaataaaaataaacatgtaaactttaacagctggtttttcatggtcaccatagtcagttgggtttggtagagcacctagttggtacacttggcaaccctctcaactgtgtaattctggagcagtaataatacattcattattgataaactgtgcaccaaatggtaggtgaggggaccctctccccccgtaacacattattgttggatttagggggagctacttaaagaatgcaaaggaatggtgattcaagcataggttttgagctttcaacatgcaaaggatgccttgaagtttaattagtgtgaaatgtgtaagagaaaagcaattctggtgatccaaatgcattgcattcatattaatctataattaaattaattaggttcataaaaatcacaaggctttcataaaatggttaagtttttaatttgattcaaagtgtttttggaaaaatgcattttatactgttgtaatcgattaccttaaagacttaatcgattattttgttcttagtctattttgaaaaagctttcaagaacaatgtaatcgattacctattaggataattgattatttgatctttgttttcatataaactgccatgttgaacactttaatcgattattaatgggtagtaatcgattacatagctatatatgattttaagtcgtgttgggataatcgattaccaatgtattgtaatcgattacacaggcttaattgaaaaaccatttccctgctttaattgattaccgtttctcgtaatcgattacaccgtatgttagtgcttacaagtttttctggtttaatcgattaccacatatagtaatcgattacatagttcattcaacttttgaagactcctgctttaatcaattaccacattcttgtaattgattacacaatgtattttgtcattctgagtcttcttcgattacaggacggagtaatcgattattttgctcgttgctcatgcccagaaactatgttgaacattttaatcgattacaaggtttatttaatcgattacacgagcattttaatcaattattaggcgcgtttaatcgattacagttagttacaaaaagatgttataaataggattgatgctcagctgcttttctaactttgtggaacattacccatacgtattttctgagcttaaacagtcttgtgagcattctaaagtgttttctaaggctttaatcttttcttgctccattgtgctttgatcatgagtgtttgactcattcttggagcttgaaaccatttcaagattaaggaaagctgtgctaattgatttggaatcattcaacctgatttggtaacttcattttgcattgcatacattggatcatcagcttgtttctctccttaatctgattgtaattttcattttggattttctttgtaatttggctattgtaattgagttcttgcttgaaactagagatggggttctcaggttcttgtctcttagaatctaatagggttttagattttgttctttatctagggttgataaagggagacattgtaattgattgtgagaactgaaaatataatagtggaactctaacctagtgtttgttggaagaaaactagatgtagcttttagtgttgaagtgaaccagtataaatctgtttgtgttttgcttctctatcctttaactcattatattctttgtgttcttgattaaattgcttgaccaacaaagccagtttcaattcattgaattccttagggctaagctacttgattgaataaggtttcttggttttgaaaagtgataaagatcctaggaactctgattttgattaaagaattttttttaaataccaagacttaaccaattcacccctcctcttggttaagtgtgagatattcatattctttacaattatggtatgttttatatgtcattagcaatgttgccatatggtgtttcaaaatcaccatatactcctccttcgagaacaaagttacatgtattttcccattcttgtaaattttgatccacatgtttgactctttctaccaaattggttatattgatttggtaactgttgcttcatttggataaataaaaatataagtatataaaaaaatgttctattggtttagaagatacaaagaacagtagacataccaaggagaatataaatacatatttttaatgtctgtgtgaatatattaccattaaaatagattacagttttattggcccactcaatgaaaactcaacttgttttactgtacatttgaagcatgtatgtgtgtttgggtattattattaaattttgcattattgtatttgttaatgactaatacaatgacgagactaatggagaatttcaaataactgatatatgtggttaacaattacctacttattgttggttgttgttttaggtcgttcttattctcttagattagttgaattgttgtgtaaattatccttgtgcgattgtttggtgtgaacgttaagttatgtggagtttgtttgagttgcattgaaaaagagtgattccgagtttgacccaaaacctgtttttgtaaaatcccaattctaaactggttaaccattggatcaccctcaaattttaaagataggttcctaacccacatatgcaaagtgtgaaaaattaatttttcacaaaagcagaaattttaaaattgggtcagctcacccagatgaattttggcaggcattttggctcgtctgggcaagtcaagtcggttataagttcgtacaccaacgtaaaatcatgaaaatggaggctttcttcttccccacaccttcccccaacctcccatcatcctcttccatcagccacggccatcggtgatcgccacgagcctctgtttcttgctattggaccaccgcacgacgaaaaacactttaatcagagcgaaatcttcaaaactcacctcgaggatttggtagagaatggaacctccaatcctcctttcttggtttctttgaggtaaccatggtttccttgtcttcttttaactagtttgaagcctttcttgatatcgcgtgtgattcgggtatcgttattgggcatttttatacttcctttgaaaatcctttgaaaatgagacgttgtaaatgtttactttttatagtattgatgtcatttttgtgaccttcgttgagccctggtcgcattagtgtgatcggaatttgaaaatgatgtccttttgatgtggactcccaaaacaccattttagcccctttttaaatttgagtgggcaaaagaaccaaaagggtgttttttttttaaatatttaccgataaggtgcgttttccaaagtatatacaaatccggtgcagaagggctgttaattacaaatctggtgctgtgcaacatgtccagatcaggcatgttacaacatgcctggatcaggcatgttacaacacgcccagattgggcgtgttgtaacatgcctgatccaggcatgttgtaacatgtctgatctgggcatgttgcagcacaccagatttctataaatagcccccccctcccatttcctaacttgcaccatctctctaaaatttctctgccttctctctagagttcttcggtggtctggtgtgcagcgaagctctgctgaagtgttttcttgttcagataaaatcttgcgaacaagtaagcgtctgttctttatttgcctctgttaaaatttttgtagtcatgttgttatgatttacttatttatattgttagtgatttacttgtgatgtacttgtgatatacttgtgatttagcaaacgatgttaggttagcaaatgaaaaaaaataggtagatacaaaattgtgtaggtgtttcagactttagtgtttggataaaatgattagcattttgaatttagggtgatgtgtggttattgtataaaggattaaataattaaggtttagggttcattgggtgtggaaggggttgattgcatggtttaacatggaatttattttcgtgcatgaagttacagtagcatggctgattttgatggagctgattcgccccgctctgaatcggatcatgaggctgagccgattgatccgacatcttatgttgtgcctaccccgtacaactggggcgctttgcgtaggcgtgtccagcgtacgcacgtttcacaagttgtgtggaatggtggcgtggatcctcgggtattgaagactcgacgtggcaagctgtcggggggcccagcatatgacatcattcctgaggtcgtaggtgatatgctgcgtgacgctggctttcttcatgtcgcacgtatgcgacatattcaggtatacaatagttgatattagtaatcaaattttatctaacgataactatacttgtcaattgatttattatattgttttagattgatgctggcctgattagtgctctggtcgagcgatggaggccagagacgcatacattccatctgccacagggtgagatgactatcaccttacaagatgtggctggaatcttgggattgcccacggtgggcaaagccgtcaccggagtgacattgtccgactgggcgggggtgatcgaggacattttcggtgaagcacctgatgaagacaccgagctgatcggtggatctcttcgattgagttactttgataggcatttcggcgattggggtcagctggacaaggattttgtaaatgtcacccggtttgcaaaggcacacatcgcccgccttcttggtgcatggctactgtgtgatagatctggaggtagcgtgatggcatcacgctattttcacttgttggaaggggacttctcagagatcggagaatacagttgggcgtcagccgtccttgcacatttgttcagacagatgtgcgagtgtacagatccatcgaagaaggacatcggtggctgtcatatgttgctgcaggcgtgggcgtggctgagattcccaccaattgctccatctattcctcagcgtacagacccacatgcacattttggacataggtatgtgtgactgtgtgtttaattcataacaattttaacatttaagcactgaaatggttaacgttatttattttgtgttcaggtttaacacgctgcccaaatttacgacgcacgaggtggtatactatagaacggccttcgaagaggtcgctcgagagaatgtatgtatgctgattgcttgttaattggaagttaccagttgtgatttatgtcattacataatacaacctaatttttttttgtgcaggtggtctgggaaccatatggggattacgatttccttggtgcatccgaccatgagcggttgttgtggatggcatcgacgccaataatttgcttccacacagttgaagcttcccaaccagatagatgcatgcggcagtttggtagggatcagccgatcccacgtgctgccatgaaactgaagggtgtgcatgacttttcacttcgtggaaaacgagaagaaaactgggtgcggaagctcaaaccgtttctcaaacgctggcgggaaagggagcagcacatcgacttcacccccccaatccatggcgaaatgtctccgaaccatcagtacatggtttggtacagagaaaatgggaagcgatttatcaccaaggagggtgcgaaaatgggtcgtactgtaagttttgttttcattaaaatgcgatggtttacattaattatgttaattgacatagttgacagtgatgtttaattttttgaatttcaatttacaggtcgatgggatagagatgctctattttgccacacacaggcagaatagggcgacgttcgacattgattgggcgcatcaagagttgggtcgcttaatgtctgtcttcagacagagttgccaggtggtggagtctggaccagaagctcccgatacgcagcttgaggaagagccacagttgtctctacaagttggtcgtcgtagaagggagggacgtggtctggagcgtcgacggatacctgttcaacaagtgcctcagcccattgttgatcccgggcctggcgctcctggttattataggccgccagctgtgtcgtcgacatatgggagtcaggtcttctatcatgaacctactgaacatagcggctcctactattctgcggatgtaccgacaccgtcgaccgcatacgatgcagatgttggatttgggaatgcgccccctgattggatgcatgcgaacgtcgagcagatgctcatggattttgatatgcatatgagcactacaggttgtggtagttgggcatcagatgttccagatgtgcccgaagctgctgaagttgcaatgccagtatatgcagatcagggcactccatatgcagctccctatatcccatcgtatgggacaggccattccgaggcggacgtgcaccgaccagatccttatcagccaggcccctctcatgcagcccccgttgaggaaagtagttctcacagacctcgaagacggaggctacctcatcgacaagcgcgagatgtgccgtggccaccaccgtcttagttgtagtcgcttgcttgtaccatttgtttgtaccatttattttgatgatgtatatcgtaactattatgtgttacttgcttgtaccacttgtttgtaccatttattttgatgatgtatatcgtaactattatgtgttacatttatttgtgttatttattttgcagtctaattattagttaggtgatatttgtcgtcgaacgcatcaattcaacacaaaggttgaaacaccgcaaacctcaacccgatttggtattattcaggtttaagagagacaagcaaagaaaattgcagctaaggaagtccttgttgaggcaaaacttgaattggaaaactaattactcaatatcagtgaacttaatataaaaccttacccctaaatcggtaaccgaagacgttgatcctaatcacaacatgaggcctaaaccctaaacaacaatcgataaaccctaaatagaacgttcatttgaaataacaacaataagaacaacatattcagtgcacatttctcattccatctgcatgtgtggtttgctaaaaatggctaaaatttcaattggacaaaaacgtttccagtagttcgattctgctatgatcttcaacacgtcttcgtcgcttatcaactcttttatctgatactcgattgtggtggtcgaatattgtgaatggtgtggctgtcgaaaaaacaatcttctcaccaactgtgacatgtgaatcccatcagggggaaatccaaccggcgcaacatccttgatgacaaccttcagtctttccagggtgcatgcagaaggaatttgaaatcgaactggatttgttccagtaaaggcataacccacagaaccgtgtcttcggggtatgttccactttccgttgtaatatagcagtgcatcatgcgttggatcaattgtcgcctgaagtaggttaagtatgccatggggtgttctgtggacggcacatagaatttcaatcgggccagcagtcgacatattgacactgcaccttaacattctgcaaacatcatcatcatttgtcagtggcacagaactaaaaaaatagtgctgacctgcatgcagggatggttgtcgatagtagatgttgtcaacaacgtggtcatcaccaagaagaagggtttgctgcatcctactctttaaggaatgaaacgaacatcgtatttgttacacgtgttcaacacgtccaattttagtcattgacatcgtgcattcaaatccatgtgtgttacatcaaaatattaaacaaacaaaattgcaatcaaaacgttatcaaaagaaagttcacatagactgagctttacgtacaacaaaaacacagaaacactaaacaaaatcatgcatcccctccccccagagtaggacaaactctccggttgtgcccaacttgcttacaaatgccacacctaacacgcctctgggatgtttccacttcgtccatctcgttgcgtattctggtggacctgggacgacctttggcccgcagcatcgacctgtcaggtatgatgactggaccttcgcccgatggaattgcccgttcattacctatcggctcccatggcgctgaatatgcttgcaccaacttgcttacaaggaagacgtcatccacgtactcaaaaggattttggcgcacgtgtaaagcagcagctgcggcatgactgcatgggtatttgaaagccttgaacttcccgcactgacaaacccgatcggcaagggacactgaatatgatttgtcgggcccatcatccacctggaattttgtccgagctacattatatctgcgaacatggtgccctgaagctagtgactgattacgcctcattgcttcaaccacatttttgcaatatcgttgtgaattctgaagctgtccggcggccgcctcgcatctgtccacgaaatattggaccattcgggtgtacgtgtgcttcacaatagctgtgatgggcatgttcctggctcccttgagcactctgttcactgattcagccaaatttgttgtcatgtggccgtatcgtctcccgtccacatcatatgcacgtgtccatttctccttggggatggaatcgatccactcagcaacctctggactggactcgcgaaatcgctcaaatccgatgtcaaactcaagcgtagagggtgtgtaacctgcaacatcaaaaaatacatcaacataagtttgtttacaaatttttgaaatccaaaattatgatgataaatttcaacgtttgactcacccaaatgcatgagggccttcttcagtcttgcatccttaaatctttgattaaaattactgacaatgtgacgcaggcaaaacacatgatgcgcaaaaggtggttgccaaccaggatgactttgaacagcagatataatgcttcggtggcgatccgaaatgaggcatatattttgcatgcgagtaacgtggaagcgaatgttagaaaggaagtaattccaagcctccagcgtctccccctcaacaatggcaaatgccaaaggaacacattcattattcccatcctgagttgtggcaaccaacaattttcctttatacttgccatataaatgagtcccatccacttgaatgatgggcttgcaatggttaaatgcctcacaacactgtccgaatgtccaaaaaatgcggtgaaacacgcgctttgcgcgtaccagtcgatgagcaacaaagtaatcatttgtctgaatatcaaaataagaacctggtgcgaaacgaagcatgtagttacaccacctgggcaaaaatgcataagattctacccagtctccgtaaaccattgccattgctttctgcttcgcataccaggcctttcggtaagaaactttaaatccgaatgtgttggtaatcctttcctgaaccaatgagattgacactgatggttcctccttaatcattcctaaaaaaaaacaatttaacattacatcaacaacatgctttgcaaacaaatgtcttaaaaatgcagaatagtcaattaaaacataccaacgaccagtgaagcaattacgtcagcatcaagctgtctgtgaccctgtgaaatatgatcattcaagcaattgtgttttccaccccattttgaaacgacccatttctcacggaaaactggtttaataaccctaaccctccaagggcaaccatcagtatgcgcaacacacttcatggaaaacttgtcgggcctgctctcaaccacaattgcttcttgatgctccttcatcaagttatgcttgactgctaattgtgcttcctttttcgagtcaaattcttgtttgacaaacaaatcatcccctagttgccatggaccctgcactgatcctgatcccgaagcagaaccagaaccgctaaaagagtcttgttcgggtgggtaactccaatcaatatatgtataatgagggattccttgccagaaaggaatcgcctcagcaactgcacattgaacgtcagtttaattaacaatgtccactacaaataaatagacaaccatataccgtcacctgaataccgaaaccctaaacaccaatcaaaccctaaacctcaacacaaatacgtatacacaaatacgtatacccaaagcaaaccctaaacccaacacaacaaccaaaacccaaccaaaccatctaacccatacacactttcgagtaaacagcatacacttatttaacctaacaaaatagcatcatttaatgcacattcaaaaacatattaataaacaatataaaacaaattaaatgacaaaccattctaattcacatgttcagataatttaccttgttctggttgactcgaaccaccctccgcatgatgataagtttgacatggccccacattaacatcttcctgatgcacaccagcatcgtcatcctcgtccgacgcactagcatcctcctgaagaagccgatcttccattgcgatattttcgtcatcgtcatcctcttcatctccatccatgacccaagttgggtcatgtgaatcctcctgagacatgttcacctctcccccaaacaatggtgcccccccggcagcatacgaggcacctccagcagcatgcgatggccctccagcagcagcacatgatgatctacgatgtggaactgcctgcatgggtagaacagcatcctcaacttcggttatatccacgtagatctccagaaaatctgtccttccctggttgcaatatgcatctagtaccaactcgacgtcttcatcatccattatttgaaaccccatgaacttctcgtgttgccataatctccccgtcaataaagtgattgactggttgctattcagacgtaacttttgtcgtatcttctcatgcaattcagtcagggttgacgtgcgtctcacagaggttcctcgtgtctccccttcaaacatgacaccctgttgaccttgatactttcttccattccaatataagacaatgcgaactgaatttccacttgaactcatgtttctgatcactcacaaccccttaaaaaaactctgaaaaaactaaaaaacactagaatgatggcagtttagcagagaaaaaaccacggaaagccaatacacgaaggaactgtgaagcggggagcgctatttatagaaatcaggcatgctgcaacatgcctggatcaggcatgttacaacacgcccaatctgggcgtgttgtaacatgcctgatccaggcatgttgtaacatgcctgatctgggcatgttgcacagcaccagatttgtaaataagcggcccttctgcaccggatttgtatatactttggaaaacgcaccttatcggtaaatatttttaaaaaaaacacccttttggttcttttgccaatttgagtgggtatttggccccgaatgttaatgttaaccttgtcttcgaaatttatactaaattatcttcaatttggtatatagagatttgcgtttgggccaaagcacgtgaacttgaaggatctcaaaacaacgttgggagacgctaacaggcgaatttatagatagttaaggggaatttattatttagttatagtttcggtaccatagttgggggcagagagtccaactatgaggatatctgcctgtccctgttgtgtgttggttttcaagaaatactatgttttaaactaatgggatgtgatgaatttgcttgttgatggataaaactgtgaatgatgttattgttataatgattagatttttgggaaaagtcttaattacagaggagaatctgcccaaaattttagaatatgtttttctatttaattctttactaaatttttaaatgggcataagagtttgttttctatactgtagtcctcctcctctttaatttagaattttcctaaattaccagtctcatggtaatatgcattgtgaatgaatgaagtttgtattgtttgaagacctggggaatgtgaatcttagacatatgatatataaatgtgaaatgcgattgtttgtgatgctgctgatgatattgaaatgaaatcatattgatgattatgttaatatgaaatgatgttgatgattatgatgatgatgttgaaatgagataatgttgattgggttgatgatattgaaataagatgagtttgatatgtgtgataatgatattgagatgatgtgatgttgatattgataatgacattgatgagaaataatattgatgtgaacaatgtcattgtgtgatgtggatatacatggatatccatggggtgtatgactggttatccttgcggggtaagatttgttcctagccaggtcatgcattgatggtgcctatggttgtatgcgatatatgtccacgtggggtgcagtggccgattggatatccttgcgaggaagggtttatgaattttgagcatcccaggagagaaaggaattgtttaaaattttgatccctagctatccatggtcagtgcattggtgatgttgtgtatgtgcatgaggggtgcatgactggataaccttgcgagggagggtttacgaattttaagcatcccaagagagaaaaagggattgtttaaaatttcagttcgtatctatccatggtcagtgcattgatggtgcccttgtttcatacatcatatttgcatggatggaaatagaatgatggacagtaagtaccgagggtactagggacaatcactctgtttggaactcctttgagacttagggttgatcaccatggggggagtgaccagtacacgacagggtgacctcaacgagctactgcatcattttcctgagagaggctatttccatgaggatggtatcacattgcattttgagagttgagtcaagtgcgtgcatcattctgagcataattgtgttgaattatggaaaagtggatgactagtttgttgcatatgggtgtgtaacttattgattttaggaatgattggagttgttatagatgttctcttttaattggtgttatatggtacttgttatttttggtaagataaactcacccttgcatttgttgtaccgtgtggttagtacctgtgatgatcgcaaacctttgttcctgtgagcagatgagtagcattaggtgaccttggagggagatcttctttttgttggaggccccaagccaatgtgatgatgttggaattctttttggaaagagttgtgtttttgttaatcaactctttcatagttaatcccttaattctttttgtggacatgtatattttgagttgtaaatatatgtaaaactaaattaagttctaaacatgtgaatgatgagtactgatttagtatatgtatacatatgtattcaattattgtaattgtatcgtgtatatgatgattgtattattgtgaaaaaaattactaccattttcataatcaaattaatagagttgtcattaaaatttgaatttcacacgattagagttagtgatgtcgtagcgacgcggcgggtcgttacataattgacccgagacagttggatgaattggagaatgagacaactattatcctttgtcaaatggaaatgttttttcctccatccttttttgacaaaatggtctacttaattgttcatcttgttagggagatcaagttgtgtggccctatgtttttacgttggatgtatctgtttgagcggtacatgaaggtattaaaaggttatactaagaatcaataccaacctgaagcatccattgttgaaaggtatttgaaaggtatgttgcggaaaaatgtattgagttttgttctaaatacattgtcacaggtaaacctgttgggatcccagctaattgtcatgaacagtcacatggaggaaaaggtacacgggggttcaatgttgtaaccaagactagagacgaggtttcacaagctcatttgtatgttttgaataacacgcctaaggttgtgccctacatagaaactcaaacaacatgtggcccaaactcacccaaaagtgaacatgatgaaggttttgcaactacataataaaactttcattagctggtttaaggcaaacatcttgagtgatgacaatgcttccacaacattatgactgttagtcgttggtccgaatttgaatgtaaccacttggaaggggtatgatatcaacaactactccttctacacaaagtcgcaagatgatagaagcactgttcaaaatagtggggttagtgttgatgctgactggggacacttttgtggtgcatctgataacaacccaattaaagcatcgatgccatacttttgatttattgaagaaatttgggagcttgattatattgcattccaagttcttgtttttaagtgtaagtgggttaatggaaacactagtgtgcatcaagatcatatgggatatacgttggtagaacttgataaggtcgggtacaagaacgaacctttcattatggcagaccaagcaaaacaggtgttttacatttaagatccttgtgactcaagatattcagtggttctacagggaaaaacatctactatcattcatgatttacatgatgatgcaacacttgatatttatgaaatgcctgctttctcgactagaatgtcatccataattgaagacaatgacgttgatcatgaacatgcaaatcgaaatgatcataatgaaggtttatgggagaaaaggaaaatataattgcttcataccaaagtaaagtattgattttatttacgtttttgaattaagtggtctaaatatttttatccaaatttattacataatacttatacatttaactgatgtcatataatggtttgtgttgtttttttcacagtgatggtcacacccccaccgtcccctccccattcagaagataatcgttctgagtcgacgtctaggaaaagtagacaatccacccgactatgaagcctgattgttaaaagctttgatcagccaggaccaacggttaatgtaaatcctgcaagtgggaaggcatctggaccacacaaagaaaaattccacaactatcttggggttgtggcaagagaaaaaaaaatacctattttccattctacttggaatgatgttccagattcgttgaaggacctaatatgggatgacattatgttaaaaatgaatacttaacgcgtttcttacaataatatttaagtgaataacatgtatttgtttaactttaacattttgtgttccaatgtaggggaaatttgatatcccagaagcaacaaaagtcaagaagaaggtgatgtcattggttagcactagatggagacaattgaagtcttccttaaccactaagtacatatatgttaacgcggatagcgaaactcaagagaatgttacattgaaatatggtataaatgcacaaacttgggaggaatttgttgctagctgaaaaacacctacttggaaggtaatttgtgaatatgttaatgtattggaataaattttttttaaccaatcaaggatattggagtcaataacatgattttgttttcacatattgatagggaataaggaaataggcacaggagatccaaaaaatgaatgactgccctcacgtactgtcttgtgggggttatgacttgcttgagaagaagctgattgaggaaaaaataagatacgaaaacaagatgcaatgaatactgagcattcatcaatggtcgatgaccctccatctccaattcctagacatgtcaagtggaggatggcccgcacaaaaaaatatggccacatgacatctaactgttcttctacagatggatcaaggttgaggttactaagcttcttcttaagcctataatattgacttttgtggctaggtttgccgcaagtccaacagattataggtttcttaggattgtttacattatcaaagggagtgttggtctagaattctctcttgagcttcctaggtggagttccagatttatgacgctgataaacagatttcttgggtttctgtctttcaggattatgattgtgttttctaggtttcctaggtttagaacaaggaagaccaaactgctcacagaaattacccaaatctttgagcttttgagccttttctttagcaagttgatattggatcttatcatcttgacaaatttttaaggctaccttttggatgaaagcaataagttgaacataacttaattgcctataagggatgttgtgctttgtaacgactctattttacttagcctattacttataatttttacgaaataaaattttctcttcttttcctaaactaattcttacgaaaagtaatattataaacgagttctttaccatcaagcgttcttgagttcaacataataaaagacaatccaaattacagttctcaacataatacagtccaaaatatagtccaacatacagtccaaaatacaatccaacataatatacagactggtctaaagtctagtacaaattacacatcatcagaacaaatacaagtaacaaactataagccatcaatatatcttcatcatatcttcttctcaaccatccgctgctatgctttattgttcctctgctcgcccaaataaattgaggtcatcgcaggtgtcaaccatagacacaaaagatagggtaagtttgtgataaacatagtttaaataaaagaatatatccatatcattcataaaataagatgcatggaaaatgcatgattctttgtttatatgatgcatgactttctcagttctcatcacatggtaccatagtcaagatagctcaactctctctctctctcgggattggatcgatcagtcagggtaggtcagtgttgcaaaaggactcacacccatactacatgtgatcatcatgggtaggtgatctccccactgccactacccccagcttagacaccttttgtctaaacactcatctcaattttagctatctgacataccttctcttgaggtaaataacacggactagcccccgctaggcacatgcatatgaaacatgcatggatgattctctttttatcccatatttactcttcaacattactcttcactttatatctcatatgcttcaattttcaacatgaaactaacacaaagttcaatatattcaaagactcatggaacattcttattaaacaacatataaaacttcttccaaaaattacataaaactttataaaagcactcaagcatacgaccataattcaactctataaatttctcaaagacaagtcaaaatacaccaaaactcaagcacatattcaaacaaacaactcttaaactatctttatcataaagcttcttaagaattcatgaaattcataaatattcatagctcactcaacaacacaagtattccaaatatttatttaaacaaaacaacagttaaaccatcattgtctcttcaaaacatttcatcaaacacatggtaggcaagctttatttcatagaaatagatgaaatattttacataaagcaagacttaaactatatttaacataaacctccctattcataccttattcttccttcttaaaagcttcactatcctccttttaaatacttctaaatctccacgtgaagttcaaggtagttggcttaggttttgcttttattcttcttgaaagtgaaaggtgaaaaggatgtgtaaaggatgaaaatgaaaggatgcaagaaaggaagagttgcacgtgtagtttagcttgaaagggacttgaaattttcggtccccacctccctatttatagtgtggatgaattgctttacaatgccttgccatgaaaatatcttcttaggtcattatgaccttactttacaaatggaccaatggcaagagtcctagcttttccaccatccaagtgtccattttcttgattgttctcaccatttcttcattcctcttgatattacacgtcccatagcttagcttggagagcaatcttctccaattcctcttcttcacgtggaatggttagtttttaggaaattttgtgctttgctttacttattatgtatgaataaaattgtttttaatatttagtaaagcttaatttaaaatgccttcttaagaataataattctaaaattatttagaggctaatttaagtcttagtaacatatttagggtgttatttaaactttacttaccaaatggttttttcttaattctaattggtccatttttcctttaattagtaaaattactaaactagcttattagagaaatctattccttctataattaagagaaaattctatagattgtgtctatcattttcctgtgtttttctgatgcttgagtttgtctgaattgagctactttcaaaatatctttccaaaattcatagaaattctagtttatggtttcttgtcaccaactatgttgataatttgttatctaagagtattctatatttttatcaaattcttttagaatccctaaggatatctaatcatttctggctgaagggtatttttgtaatttttaaaatgtccaggggcattttcgtcattttcacctttaactattttttgtaaaatataaatgcatattaataatcttttgagagtaattcacaaacatgtattgaaatatgagggtgttacatgcttcatacataataagcaaagaaaaacctagtccaattgtaaaaagaaatagtaagtattgagttatcgtatccacaaagactatgtgtaacataaagggaatcaccaaccaattttaatacgcattcgctacaaccagttatcaatttgttgtggtgaatgtgttaagtttcaatttttgaaaagaaacatttcgttatagtgagtcgtcaattcattatgacgaaactaaattgtttttggttttgaaagaaaatttaaaaacgaaaaaggattcaaatagaaaaagtgttgctgagatgaaatccatagaattcttcacatgaaatttgtttctaatgaatcttttagttcaatgaaacctagatccaaactacaatgactaattcaaattctctagtgattaatccttgagttctaagccaaatccctaattccttaggtgatttagacttagaaattcagagcttgattagtgaatatttacaaatggaagtatttgattcattcctaccatcaaagtcttacacaatttcaattcatatctaggatttgaacttgtttcttcatgcttctgatccttgtttgttggggcgaatggatgactcactggggtgagtttctcttaactccaaggtcttcaactttgtagatttactgtggcaaagtgcatcttcgctaaggcgaatctctgctagttgcaactgatcaatagtcttattttgttgtgatgaaaacacaactcgttgttgcgagatcatgtctgcaactctttattcaaatttattaacaaaaacatcaaaaactatccttttttagtttctaaaaatagtttaaacaatttattaacaaaagcaacaatcatgtacgaaaattctaaagaaaagctagtataattgctcacaaaataaggtgtcattagcaattatcaaccaacttatctcaatcacatccaagattttatccaaatccaagaccgatttataaagttgatataaacacccacacactagtcactaaattttaataagcagtaccacaccaatacatccaaacctcttcttatccaagagttaattccaccaacatgattctacacatatacttcactactaatatatagcactctgattccattttcttaaacattccataaggttgatcatccagttcacaagagaataactaaaacccttttttgtctagtgttgcgctgatattcatgttagccaaaaagggaaatacacaaacttatctttcgtaatttcatttttgcctctcttattttgaattactaatattttaatttaggaaggacataatagaacaaaataaaaggaattagcaagaatattcctcatgggtcattttctcttaggagaagaaacacatgtatctatctgtactatattgtttctctctccaaccacccaaacgtgaaacatagcactacctctagttgtaagacagtggtcatatcatgaaacaaacattgatcccgtaatggatacttcacacaattttataaaagacaactcaagctatgcattcaagttaacgaagatattaagagaaaacgagcaaaagaactctgaagtgaaactctgtcaaattcattggacgatatactttgcacctaaatagttcccaccttgcctagcaaagttaatatgtgtattcgagcttaattttttatccactctattgagtgatctgaattgatgtattcattcaaacttttgtttgagaaaatcaagagtgacttagtgtaaaaaatacttaagtatcttacatttagggggagtctaaggatgtgacagtagtggcctagacaatattattgtagccacaactggtaggatagaatacttgtttgtaaacaactttgattagtgaaaccttttacaagtttgtaaagaagaactagacgtacagagctttatttgagtgaactagtataaactaagtatttatacttctctcttaagctatttgattagttgatatgaaccaatacgggggttcattttttttgtacggatcgtcctcgaaaaggtttcttgttataacaaagcaaagatgctcttgaaaagaaaaggtacaagctttatgtataatgtagcgcaacagaatgtattgcacaaaacagaagttaaaacaagcaaagaacgtagcttaataagaacttagtgtcataggcaaggcgcacgccaagtgtttgatgaagcaaaacaaagataaaaataatatgaagaagagtgcagggcaaaaataatgagtttaacaagaacaaaatgttaaaaaaataaaagcgggaaagacaagaaatggaagaagatgccacatctatggagagtgataagtcccatgaggattcaccacaaaggttatagaaacctttgataagaaccaaggtttgatccaatcaagaacccaagagaaacttcctctcacacaactctttagagtgcaaagtttttattcaattcaaatgtgtctaaataagacaaatgattggttatttatagccaacaagtggtgcctctctcctctttctttccaatgtgggacttcagccacatattcctgattcaaaattacactaaaagacgtctaaacgaaaagtaattttcgtccatgactttgtgctgaacttcttgtccaattttcatcatcatagatgcagagttagaacttgagactagaaatacgacttgtaggaaatctttggagctttcgaactcaataaagaacacctaaaaaggacatctagaactcaagttatgttcaaaacattggagcaatctaggctcttcactcgttagtatttaggctttttactcatttaaataaattggagcaatctgagctcttcttttgggttgatctttgggctcaaggcaaggttgatgtcttggcccgatgcttgagaaaggaagtagttcacttcatgatccaatgcttcttgtgcttccttttatctttcccttgtcatggggcctcccaatccttgtagtgcaatgttgggctttcggcctgttggaatttcttggtcctcatcaagctcccctcctttaaaagaattcgtcctctaatttggatcttcatcacctatatcaaaaggacttaggtcagcaacattaaatgtggtgcttaccctatactcaccgggaaggtcaactttgtatgtattgtcattgatcctctccaagatttggaaggacccatctcctctaggtaaaagttctgatttcctttggataagaaacctttcttttctaatatggagccaaacccaatcttcgggttcataaacaactctttttctccctttgttggcttgtttagcatattgctccatttgtttctgaatttgtgctttcactttttcatggagcttcctcacatacttggctttagccttaccatccctatgattcaaagaacaaatgttaggtaaaggcaacaaatcaagaggggtgaggggattgaacccatgataaacacgttgtcgacacgcaccaaaacaattttactaagctaattctgtagcacagagataacctaggtcgactcagagacacaatcaatatggttctagcttcaatttacgaataacagtgagggagaaattttatcaaacagtttgtgtgcataagtaaaacttacaaaaacgtaaactaaaattaaagagcaacacagaaactaacagaattcaaaagaagtgatgtaaaacagaattaaaaacatcaatccaattcacctcaccaagcaattcgaatcatcattgttctcagaaattattcctatcatgaaagttcattcaatctcattagaagcaactcaatcgagttatcccctaaattgattgaaaccacaatcctaactgaaatatcatccaattaattctgtgattaatgttcgaaattaggaaatgaatccataacctaatccattttcaatcctaaacgcattcataatcatgaaaatagaatagcaattgaagaagaagatgaacattcacataggatttgaaatactaaaccagaattcaaattctccttgtgcttgggttggattcttggattgattaaggatttagccttccatgatcatcatcaatgaaagccccatgaaatggttgcacaaaaatggaagcacagcaaaacaaaaatgaagaacaatgaaaaacaaggaagaacagtagagagaaaatgaagaacaagggtttgattctaaaaactaaaggaatgaaaaataaaacttgtttattgaaatgtaaagagtggtgcccaatataataaccctaagtcatgacgcgaacggcgcaagcatcagagtgtgtgtggcgctctaaataatcatggttgctgaaaaatggacaattttggagttttgctgtaagccacgcctggagcgtgggaagtgctctagaaagttgatttcccacgcctgaagcatgggaagtgctccagaaattggttttttttctgccagcccacgctggaagcgtgggatcccacgccaggagcgtgggagtcgcgtcagggcctatataaggcccgaaagcatgggaaaaccttggcttttcttcctttcttcttcctctccgtccaagacctccattggagcttgttccaagctttttctgaccctatttgagggcctaaacacttcccaaaccatttaaacctcctagaaaccttaagagagcttgaatccttcctcaaatctctctaaaacccctttatcttgagaaacccctaagaggttgaagagaactcgagtttggcgaggaacggcagtggcccacggacacctgagcttggaggagtgttccagaggtcttctgtgtcgccattgaggtaagaaactcgagattccttggttgattttggatttgggggttttgatgaatagtgacccacttttggtagagctagaattagctctgggtccagttgagagatgtgtttagaatcatgagaggaggaaggattagctttcaatttgtgatttggtgactgttgattttggctctagattatgcatgtgtgacttggactgagtcacttgatctgagacatgccagagccttacagatgggcttgttgtgcctgagaggtcaggggaacggtgtcttgtggaatagaccgttcaagccctgagaaaccctgaggtttgggttgtgagagctatgatgcatagtatgaatggttgagggtgagtctagaatgactctgaagccatgaatgatctgtgatagaccactgagggtctatgggaaggcttgtgtggataagcctgatgaaccctagagtagttgactcgggttgagggaaagaactgtggttccttcccagaggcggttgatgtctgcttgatgggcttaggcatggtcatatgcttgtatggtctgtgatatgtgtgattgtatgccttggtagggcttgacacagtggatgtcagaggagcagaccataagtcgaggcggaagctgtgaggcacggctagccaggtaagctcatcgttctggggattagccttttctcttgtttacacccaagtgggtgacgaatgcatgccttgcttgattatatatatatatatatatatatatattatgcatgctatggaatgaaaggccaaagtggcctgtttgattaattatatgtgttggaagccgaaagggctttaagaaaggtacttagagtggaactcagacagttctagaaagatgaaccctaggatagacactaaaacagtgtgagggttatgagacacctgatatggcaggtgtgaggctgtgggccttttgagagaatgcagatcatgagatggtttgtgatggaacctagaggatactggatgagtatcaggctagttgaggttccctagccaaaggtagagtttgaggactccttggaatagctgagattccttgggaggtgccactgctctccacctaagtcctaaggacagatggaactgtgtgaatgttcctccttaggcaaagatgttggaaatcctgagtgattatcctcaggccagtgtgtgtgaaagtcctggaggtgattgtcctatatggatgttcttgcccaagcatgtgttatgaaagtcctggagggttttaccaggccagatgataggcagatatgttgtatctctaagagagggcttcccgaggggggactagagcctagggcctcttagatgagccatatctgtattctcaaagtcttgagtggagggatctcctcaggcaatgtttgtgtggttagaggcggtgcctctctggtatggaaagtgtctagtgagagacactatgataggtacctatgtgagatgtctgtgagacaggctatgagagcctagatgagatattgatgccatgatgatggctttgatctctgtgagacggctgagagagccaggatgaggtggaatacctctgatgccgagagcatccagttatggacccagatggttgggatgtgtgaaagctaggatattgtcctagtctttgtatgtgtgagctaggaggatttcctcagctctgtttttatgttgtgtttatgcttggtggtgaaccagggttagggaggattcccagaaccctgagcttactgagacgtttgtctcaccctgtgtggggtttgtggttttcaggtgcttcttgaggagaggagctacctcagggcaggaggccctagtgacctgataggctggatgggaggctgcagtagaagaccaaagcagaacttcaagtgttgaagctggtcttatatctctttgtagttgtaaggtatgtgtatacccatttcctgtacatattataatgtatgacccaactgtggtcttgtttttgaacatgtatatgtacagatgatgaggatgtatatatgtatgtttcctcctgatcgtctctgtatgattatgttgtgtatctgcctatagtgttgttatgttttatctggatcagcaggggcatgttttatgttctttttatatatggtttttatattccattcataatgtaatcaagataaacgattctatcgcttccgcaccgcgcttagttaacgctgatagcgtgttatgtatatcattgatgataacatgtcggagacgtccggggtgttacacccacgtttagctaaagtcactaatatatgtagtgactgagttttgaaaataaaatgggtcacaaagaaacctaacaatctaattatttgctatttacaaccatgaaagtcaaattcgcagcccaaaattacaagtgcagaggtgctaacttcaaagcttaaaatgaccctctaaatgatagaattagcctcagtctatgtctagcaaacttgtatatcttttcgttatttttccagggactcctagaacgcttcattcggagatcggtagcaccctataggtcctgcacaagtcagatacgtcaagtgagccaaaaatccgaaaatacgcaacaattagcaattaagctcacttacttgcctaagccaaaaaatgaattagaataggaaaataaaggtccaagagaggtcaaataagctaagaaggatagaaaaatactcaactaaaagcactctatcaacccatacacaatctcaaagacagaacaactagttatagaatgaacagccctattataagcaaattcaacaagaggcaagcattcctcccatgtcttaacatttttcttgatgattaacctcaacaaggctgaaagggtccagttcacaactttgatttgtccatatgtttgtgggtggcaagtggtggagaaaagagcttagtacccaacttattccaaagggtcctccaaaaatggctaaggtgttagatacaggaggagctggaaaggatcaaggagctgagactcttaggcatggatatgttttagcttttacatgtcattcaattgaaggaataagtaatctttagatgtctaagtaagtcatcctatgatccattgcattgcataaacaccattcatagtcttgcattcatggttttcataaaagcataagttttgtgaagaaaaaccttttcttttgatgattgaataaaaagtcaagtgttcaaagtttaagttttggaaaaactattttgcactgctttaatcgattactagaaatgataatctattacttaagctttgaagaacactttaatcaattacagtaatatggtaatcgattacactttacaaagtcaccgaaatgtcttcctgtgataatcaattacaatatgtggtaatcgattacttggcaggtttttggaaacaagacttcctatgttaatcgattacatgacaatttaatcgattactttgttcatatatcttttctagaaatctcaataacaatttaatcgattgaatgtgttaacaatcgattacgtaagtaatattaatcgattacattaatgttttaatcgattacttagtgtttgcccccaccaattctaaatcttcatgttactttaaaagatttcattttgggcaagattctaaagaagttcttggagagaatgagctaaaattgtttttattcaaccttggttcaagataagtaatcatttgcattcatctacattggatcatcaagttgtctctctctattcaactttttttgtaaatttgttttagaatttcatcttgtttgtaactattacaattagtttcttaaggcttgtctagaataggtttttctagagggaagagtagagaagggtttctctatgtcttgatcacaaatattctaagggagttagatttcttgttcttaatctaggtttgattgagagtgattgtataagcttgtaagaaacaaagattgtgaatagtggaactgtaactagttggttaggagaactggatgtagcttctcaagggtgagaagtgaaccagtataaatcttggtgttgaatctcttctttatctcttcttgttacaattttcattcattggattatcatttcacaatcaatagaaatatattttgcaaccattgctttctttaaagattggtatttgattgactgaaagttttttaaaaagttgttttgtgatacgatcctttatactctgattgttttagaaaaaattacttgatcaagaacaaccaatttacccccctcttggatattgtgtgttgttcatactgttttcataaggaacttacaatccctatcagaaaacaacactttggagtgtataggccatgtggcaaaacttttgatttagcccttttacaaactatgcatctagcacactacttatgcacatcgcgccacattccgggccaatagaaatgctcgtacaacatacccaaagtcttttgtatcccaaaatgacccatcagtacgccctcatgtgcttctctcaaaagaaattcatgtaaagaacatttaggcattgataacgattgtcgaatcgctacaaaacaattaaactacgttaattctgtagcacaagattaatctaggtcaactcagagacacgatcaatttggttccaacttcaattcactaataaacaatagggggattttaatcaaacagtttgtaggcaatgaacaaaaattgcagaagcacaaacaagaattgaagaaaaatgcagaaactaacaaaattgataaaaggtgttgtaaaacatattcaagaatatcaattcaattaaccaaaccaagaaatacaaattatcatagttttcatataatgatcatattatgaaggttcattcaatatcattagaagcagttcaatcgaattaactcctaaatcaattaaaatcacaaatctgattgaaatatcatccaaataatatgtgattaaaattcaaaattaggaaataaatctataaactaattcgttctcaatcctaaacatattcattatcatgaaatcaaaaagaggattgaagaagaagatgaacattcacatagaaattagaataataaaccagaactcaaattctccttgcttggactggatccttagattgattaattatttagccttccatgatcatcatcaatgtaagagccacaaaatttgtatgagaaaaataaaagaacagagacgaaaggaagtagaaaaataaaaaacaatgaagaacagttgagagaaaatgagagaaaaggttttaattctgaaaacttctaaaagaaactacaaattttgtttgtgctcaaaaaataaagtgtgtctcctcaataactaattgcactaagatatagtgactgtgtcagtaggaaagtatgggccatgattaggcccatctaatctaactaattactaattgcaccaattcgcagctcaaaacttgaatgcaagggttctgacttccaagcctaaaatgaccctcaaaatgatagaattggccttaacgtatctctaacaaaattgtagatattttccttatctttccaaggactactcatatgcaccatttggagttttgtagagctctctaagtcctgcacaaggaaaataggtcaagtaagcaaaaaatccaaaaataagaaacaattatcaattaagcccatttgtttgcctaagacaaaaactgggttagagagaggaaataaaagtctaaaagaagtcaaataagctaagaataataaaaaaaatatgaaactaaaaacactcaatcaacacacacaaatatttttctttgaaaagaaacccatcatgcttataatacccatcatgcgccccccttttcgcacgcaacatatatctcacagcttcaaactagattcacccacattgtgaatcacttgcttgaacttggaaaaacttttgatgcagaagaattgaacatctaaattctcaagtgtctaacaagggattgacaacctaaagtcatagccattaaagagtctaaagatctatctcaaatgtcaatggcagcaatgtttggtaagcttttggaatatgagcttgaattatctcaactaacaaataatgaagatgcagataaaaagcacaagagcattgcattaaaggctgcaccttcaaagatagaagaagatgatagttcaagtgaagaagaagatgatgagaatgtcaatctcattgttaaaaagttttccaaatttttaaggaagaacaagggcagaaagcaaccatttcaaaagaaaaggaatgactacaaaaacaagaacaacaactcctcctcaatcacgtgctttgaatgtgagaagcaaggtcatataaaatcagattgtccctcattatcaaagaagccacaagtggagcagaaatcaagaagagaagggaagcagaaaaaggcttacattgcttgggaggataatgaatcaacaagttctgaatcctcatctgaaaaagaagttgaagctcacctatgccttacatccaccatcaatagagattgtgaatcatcaagcacagaatcagaggtaaattctgaatttgatagtgttgttgatacatttcatgagatgcatttagaagctcaaagactagcaaaagcaaacaacaaacttaagagtgatctaaggtggcatgtctccaaacttgctgaattgcaagatgagctttgtaagttaaaagaagatcatgataagcttctctcaagttacaaagagaatggatgtacatgttcctcagctaattctaaggttgatgatttcaataagttgcaaaaagaatttgatgattataagctatgtgcaggaaaagaaaacatgttcttacaaactgaaaatagttatttgattgatttgttgagaaagtattacaaaggcaaatgcaacttagatgaattactaagtgtgcaaaagtttgtttgtgatacttatggattgggatataaacatggagctagaactcaaaataagcttgtgtttgtacctccaaaacataagaatcaaaggcagcataatcaatcaaatctctatcaaagatttactcatgccaaatcatcaaagaatcttacttgcaattattgtaatggtgaatgtatatgggttgagaaaagaaagaaaacaactaacccctttggacccaacttaaattggggaccctatctctcttttaaaataacttgtgcaggtgtgtcttagagcaaaatcttcaacttggtacctagatagtggatgctcaagacacatgactggagacatatccatgctaactgatgttgtacttgaagaaagaggacatgttacatatggggacaataataaaggcaaaataattgggcaaggaaatattggagacagcttgtctacaaagattaaggatgtgctttatgttgaagggctgaaacataatttactaagcattagtcaattgtgtgacaaaggatttaaagtcatcttcaacaatgagacttggttgatacatgatggcaaaagtggcaaagagacacacattggtaagagaaagggtaatatctatgtcttgactattgatcatgcattcatacataaaactgattgcttgatgagtaaagtgaatgaaacatggttgtggcatagaagaacatctcacataaacatgcatcatcttaaaaagttaattagaaaagacctagtaattggtctacccaagcttaagtttgaaaaggacagaatttgtgaagcatgtcaaagagggaaacaaactaaaaactcttttcaaagtactaatatgatttttacttctagacctcttgaattgcttcacatggacttgtttggtccttctagaaccatgagtttaggaggaaattattatggacttgttatagtagatgattactctagatacacatggacattgttcttaagatccaaaagccaagcattctcagcttttaagaaacttgccaaagttattcaaaatgaaaagggctgtaatattgtttcaattaggagtgaccatgatggtgaattccaaaatgaacactttgaaaaattttatgaagattttggaattaatcacaatttttcagctccaagaacaccacaacaaaatggtgttgtggagaggaaaaacagatcactagaagaaagagcaaggactcttctaaatgaaacaaaattacctaagcactttttggcgatgttgtgagtacggtttgttatactcttaatagaattctcataaggcctattttaaagaaaactccttggattttgtttttgctgaaggtattttttttaattaacatattcttttaacatatcatatatataatttaatataaaaataaaatttgcgttaccagaaaaaaagagaaggagccataaaaaaggacatcagattccattgtgtcatccacaatggaatctgataagtgagattctgagaaattgcttacataattttcttctgtcctaagaaattattcatcgaaataatgatttactattaatatcgacacatctgagattgctaaatgttcaggagttcttctattcaatccttttccttctccttgttgctggatatctcgataaatctgaccccttcccctattccgcttacgtatataggatattttaagaaatgaacatctctcttaggaaaggtgatttcattatattttttaccaggaacatggcctaccacaagaatacttttttttgtagggcgatagttttgaaaagacataaagggaggaaaccaaacatctctcactttaaggtatttggttgtaaatgctttgttttgaataatggtaaagacaatcttggtaagtttgactcaaaagctgatgaggctttctttctaggctattccttacaaagtaaggcttatagggtctttaacaagagaactttgtgtgttgaagagtctgtacatattgtatgtgatgaatctaacccttctcaagaagaagttttgagtgataatgatgcagaaaacaaagaagaaagacagcagcacatagaagccaaacagctggaagaagatgaaacaaaagaagatataaattaaggaacacctacacctaaacacaaggattggagaacctcaagagacctctcattggacaacataattggtgatgtatcaaagggagtatcaactagatcttccttaagaaatctttgttgcactatggcttttgtatcacaaattgaacctaataacattgaacaagccttattagatgaacattggttgattgtcatgcatgaggaactaaatcagtttaaaagaaacaatgtttgggaactagtacctagatcttccactcacaaacctattggcacaaagtcggtatttaggaacaaactggatgaaagtggcatcataattagaaacaaggctagattggttgcaaagggttacaaccaagaggaaggtattgattatgataaaacttatgctccagttgctaggctagaagctattagattactccttgcatatgcatgtgtaatgaactttaaattgtttcaaatggatgtgaaaagtgcatttcttaatgtttatattgatgaagagatatatgttgaccaacctcctggttttgtagatcatcaatatcctaaccatgtgtacagattaagaaaagcattgtatggatttgaacaagctccaatgtcttggtatgagagactaagcaagtttttgcttaatcaattattctcaagaggagaagtggacaaaactgtgttcatcaaaaggaagaacaaagatatgcttatggtacaaatctatgttgatgatattatttttggttctactaaccattccatgtgtaaagaatttttagcaagcatgcaaagtgaatttgaaatgtctatgatgggagagcttacattctttcttggccttcaagttaaacaaatgaagaatggaactttcctaagtcaatcaaagtattgtttggaaatgttgaagaagtttgaaatggagagttgcaaaactgcagcaactcctatgggaacttccacttacctagattctgatgaaagaggaaaaagtgttgatgagtcaaagtatagagggatgattggatcattgctctatctcatagcaagtaggtcagacataatgttaagtgtttgcctatgtgctagatatcaaactaatccaaaggagtctcatcaaacaatagtgaaaaggatcttcaaatacttaaagtccacaccaaaagtaggactttggtatcccaaaggtacaacaatcaatttaattggttattctgactctgattttgcatgatgcaaattggatcgaaagagcacaagtggtacttgtcatattctaagaagctctttaatttcttggcaatgtaaaaaacaatcttgtgtagccttgtcaacagcagaagttgagtatatatcagctagaagttgttgtgctcaaagtctatggctgaagcaacaacttcaagactttggtgtagaacttcatcaaattccactattatgtgacaacacaagtgcaataaatatttccaagaatccaatcatgcattccaggacaaagcatattgaaataaggcatcatttcatcagagatcatgtacaaaaaggtaacattaaagttgagtttgttgatagtaggaatcaattggctaatatctttactaaacctttggatagggagagattctttacattgagaaatatgcttggaattttggatgaatcaagtgtatactaagtgacatttctatgattactttcattgattatgactgaactagacgttgcatgattaatagcaactcaatttgatgtaaggattacatgatgtatgctgcataaattttgttttagtgtgtaaaagctgatataatcgattaccatgagttcttaatcgattatttgatcattctgtgcaattttaaaaataagtcaaagttgttgtaatcgattacatcatcggattaatcaattattttcacttcgtattccagaaaaatcttgttaactctggaataatcgattaaaacgataatttaatcgattacatgaagtctgtaggctttttacaaattctggaacttcctggaataatcgattaccacatcgagataatcgattattctacctctgctggtctgaaaattctgtctcattctgtcttaatcgattaaaacaagttataatcgattacacttcatcttcaacaagccatttgctctgatataatcgattacatcaaatgttaatcgattacatcatttctgaattgtgatttttaagtcaaataatcgattacactatttaaataatcaattattgcagcaattactacaaaatctgacagttttcaaaattaaccaactgccattaagcgcgatttgttgtaatcaaaaccattatggacgtgattaaagtcacaacagccatatttttcaaattctcaactgctcacaagcttgaacttgcctataaatagaagtattatgaaattggtacctcacaaccaaatacactctgttttctcatcttctcttaaactctctaaatctaagtgtctatcttgatcttttgtgttttttattcgtatccttttgtatcctcattatgtctacatccaaaagagtcaagagatccaagagaaaagctgatgctctgccttctaatcctgtaattcataggcttgatcattggttcactaatgaagcagatagaatgaactacatgcagttcaatgcaaccaaactcctttgtccacccaaattcttaaatcctgcttggtttattcaagaaggttgtcagtttcctcaccttttagagcaacaaggattaaccaagtttgttcaaatgaaagggacattttaccctgacttggttaaggtcttctatgcctgttccaaaattactatgcatggaactatcctcactcaagtaaatggtgttgcaatggagattacaccagaaatatggcaagaggtagttggtatctcctttgatggagaaagaagatttgaagaagaagctgaaggttataacaaaatggaaacttataggagcatgcttattgatcttcatatgaatctgagattgaggttaagcactagccctatgactcatgaggataggttgctgcactgcatcatcacctatattcttactccaaggactacaaataatgctcaagctacggatgatgatcttcaagtgctatatggactgaagaaaggaacaaagcttaactgaattctgattattcaagaagtaatgcaggaatctaaaaggctagtaagctatccttttccttatgttgttttggtctctagattcattgactattttcaagttgatgtatcaaatgaagtcatggatgacaccaattcaagcaacagtcaaattaaggaaaaacatctcacaaagcttggtatggttaaaacaccctatggctggcaaatggcaggatagcctgtgccattaaatgaggaagaagaagaagaagaaggagatgatgaagaaggaaatcaattgggagatgctgagaagttcaagaagaacctgcgccatctgaaccgcattactcatcatttgaatccttaatgattcagaagatggacgcattgttttcactccatcatgaacaaagggatgaagtgaatacatctcttgaagaacttaaacaaggatgaaaattatagaagataagatttttagggatgaatccaggatggattaggtcttatcttagcctgttctagtttgttttagtttgttttgttatgttttggtatttcccttgactttttaatgaatttaatgtatttctttttcaattcttgtctatccctattaatttttaatttgatatgccaaatagggggagtaatatgaaattgataaaaagaataaaaagcaaaaagcaaggaatctttaagtcagggggagtaatgaaatagttatgaaagttatgctatgtgttaactaagagttatgaaagctatgaaagctatgttatgtgttaactaagagttatgaaaagctatgatatgaattgatgaatgatatgaatgattaaagaattgattgtatgaataatgaatttttgtaaagcatcaagatttggatttaacacttgatctatgcaagtgctgagaaagtttttcaggtaaaaagcatgtttcatcaattaaatatttggcatgctcaaatcaaaaagggggagattgttagaaatgaagaagattacaagtaatcaagatgaggaagattacaaagaatcaagtagaagaagattacaagttttgattttacatgcccactcaattgatggcatatgtaattgtttaagcttggttcaaggagttaaagccttatattcctcacttaggttggttgattcatgcatgcatacattcattaaatcatgtttaaatcatatgaaatcatttaattaattggtaagttttaaaggaaataagattttcataaaaatcattttttacagttttaatcgattaccaatatgatataatcgattaaatgcatatagacagatctgcatattgccttcagaacactttaatcgattaccaataactcgtaatcgattaaatatgcttgactatgttaagtcgttctgtgataatctattacatcatggaataatcgattatcttagtctcagcataattcacagaagcattttttttatctggtttaatcgattaccagattgttataattgattaaatatgcattgttgagtttttcacacttcctgtgataatcgattacagtagtgtatcagaaaatcttgatctcctggaataatcgattacaagaaggattaatcgattatttgttcttgagatttttttcagatttctgatgaacactttaattgattatattagaaatttaattgattacatcagttaaaataatcaattacagtaacggaataatcgattacaagtagttaattctgtttttataaatagaaggagcttattcttaattttcaaacaagtctggtgaaaatcattttttgagagttctaaaatcacaaaagcacaatagaaacgaaaattcaaaagagaatcaagaatcatgaagattgtcatgtgttgagtcatctactacataatgtgaagattgtgttcaagtatttgtcaaaagatttcattaagaaagatcattgcattcattctcagtttggtttgatcatttaattttgttcattgcactgaggaattagaggtgatatctttcttgaaccatttgcttagttgttttgattaatattgtgtgattttgttgttggttgttcatataacaaattgtgatctttaaagcttgactagataggtttctagtgggtagaacagagacgggatctctggttcttaaatcttttgaaaagtctataggtttagattttgcattttacctagggagggtaaaagagatctttgtaagcttgtaaagatgttatatttgttatagtgaaatctctaatcaaggctaattagaagtaaactggatgtagcctctggggttgagaggtgagccaatataaatcttgtatgtgattgaatatttctgttcatattcatattattcttgaaatattatttttgttcatatcacaaaattggtcatagctcaagagtggtttgattgagataaaggtgaattcagaagtttgatttcttaattggttttaagatacgatccttctttcaagacttctgctgtattagaatttttttaaaaagaaattttaaaaactctgaggtaaaaccaattcaccccctcttggttatttgcataagtgttcattatattttcatgctcaccaagcgagtgattgtcacattggtgcaacttcctccatctatgatcaaggagcacatttgcccttgaatgacacatcttgtgtggaagatgttttctctttggctttggtcatcaaccacaatctggtttcccaagagccttcttaccattaacaagtcaccttccggagcataagctttagaatcatctttgtcctcacttgtaggtttttttcaggcatgagtcactagaaatgtacccattgtcccttaacaccatgacatacttatttgggcatggtgaggcgatgtgcccattgcccaagcatttgatgttcctagctttttgagtgacagaagaagaagaagcattattagtagaaaccaaaggtctagagtttttagagattttaccttccttggcccatgcggatggatcttctttgggttgtctatctttccaagaggaatgcttgaatcttgaagaaggtttttggttataatacctcattttgatttgttgctcaactttgatcgcttgatggactaagttcccaagctcgatataatgttgtagctccacaacatcttgtatgtaactattgagcccatgtaagaagtgcaccatggcggcttctggttcttcaacaacattcgctcgtacctaagcaacctccatctccttgtgatactcatccacacagttagtctttggagcttattgtgaagctcccaatgttaatcgggaggaacatatctttttcttgtcattgctttcaaaaaatctccctccaagcattcatcgattcatttcctattctctttctctccatttgtagttggtcccaccaaattagagcatagtccgtaaattctatggctgtcaatttcacctttttgtcttctctatagttattgtagtcaaaaaaaattctctattttcatctcccactccaaataagcctcggggtcattcctcccttgaaatttaggtattttaattttaaccacatcaagtctttcatccttctcatttctcctcctaggtctttcttctctattactttccctatgcctcctttcattccttcacctatcctcacgcctcttaagactctctctctctctctcttcatctccactatcactcctttgagtgaaggttctagacctacgcctttctcttttatccatcatctcctccatccttcaattgtgctttaacatttgagcaaattgattggtcaactcatctaggcaatcttgcattgcatcggctctagggatgggagaggtactagaaccactaaccatcatatagtagtatgaggaaaaaatgaacatgacctcaccactctactcacgtgtttcactcaaaaaatgacaactcgtgttttcactaagaaaatgacttttgattttaatgtaaatgcccttgccttttaccactcaaatttctctttaggttcttaacaagatcagccacgtttcaaaatcaaaagattttttttatataaaaattgtagcaaccctcacaagagttgctcactggattcgctgaacgaaagaaaaaccacaaagacaacaatcgaaaggaattttaaaagacaaactagaaaaggtaacaaagaaagacacactcaaataagaaggccaaacaaagacaatactgaactagaaaaaatacagaataacgttatagcaccacaaataaacgttcacagttgtcaaatgaattagtgcaaaggggttttcttatgaagcaattttttaattattttgacaataaacatcttaaaagaaacacttatggtcttctcttgtttttttttaaaaaaatttgctaccccttttcttgttcacactaacgcaaatgattttcgattgatgcccaattgtgaacagtaatggttcaattcaaaataaggtgcaaaatataacgaagttgtaaattgtgcaaaatataaagaatgataaataaaagaacaaaatgataaagaacgagaaataaaaaaacaaaatgataaagaataaaaatgaaagacataaaaatagggcaggaattaaagaacaaaatgtaaacaatgtagtcactctggacagaatggcaatgatcaagagatctaactgtgtatagtggattatggcaccgaagtaactagttatgcttggtgtaagaaagcaaaggaacagtacacacaaacacaagaaattggccaattctaggatccaggctcaagatacctaccacatgatatgaaccactatgggtttttttttttttgtacggatcgtcctcgaaaaggcttcttgttataacaaaggaaatatgctcttgaaaagaaaaggtgcaagcattatgtataatgtagcacaagagaatgtattgcacaaagcgaaagttaaaacaagcaaagcatgtaacttaataagaacttagcgtcatagttcaagtgcacgccaagtgtttgatgaagcaaaacaaagaaaaaaataatatgaagaagagtgcagcacaaaaataatgagtttaacaaaaacaaaatgttaaaaaaaataaaagcgaaaaagacgaatggaagaagacaccacacctatgaagagtgataaatcctgtggggattcaccataaaggttatagaaacattttgtaaaaaccaaggtttggttcaattaagaacctaagaggaactttctctcacacaactctttagagtgcaaagtttttattcaattcaaatgtgtctaaataagacaaatgaatggttatgtatagccaacaagtggtgcatctcttctctttctttccaatgtgggacttcagccacatattcctaattcaaaattacactaaaaaaagactaaacaaaaagtaattttcgtccataactttgttctgaatttcctgtccaattttcatcatcatagatgcggaattaggacttgagactagaaatacaacttgtaggaaatctttggagctttcgaactcattaaagaactcctaaaacggacatctagaactcaagttatgtttaaaacattggagcaatctaggctcttcactcattggtctttgggctcttcactcatctgaatcaactagagcaatttgagctcttttctgggttggtttttgggctcaaggcaaggttgatatcttggtccgatgcttgagaaaggaagtagttcacttcatgatccaatgattcttgtgtttcctttgatttttcctttgtcatggagcctcctaatccttgtagtacactgctgagctttcagtccgttggactttcttggtcctcatcattagtattctctaaagcttacttcgacacacttagtcatcaagtgtttatttgaaaactttgttaaaaccttgttttatcttacattggatgatagtcatttgttttcactaaaattgtttttcactcattggacaacacagtcagaatctagtgtgatcttttgatatttcatatattttttcccttttgtttgaaggaggaggaaacatgttcatatctatatctttcatgagaaaagtttggtttaatttagaaggagattttagggtggtgtggtatcaaatctatagtacgacatgatcctaaaatgaacttttgccaattttttggtgtggatggtcctataaactcagtgacagttagtgggtggtgtagagctctacttatggaatatatggaacactagaaatgcttgtatcttcagtgagaaaactttcggtagagaggatacaaattcatatactgacttgtgtgatagagccacatatcatgcgatatagatactatgatttgatgtttaggagtttgcaaggtgaattctttttgtatagggtcactttggttcttgggatattttggatttaattgtctatgaactattaaatttctagtaaccttgttttccttgggacccccttgtaaatgggttttggtaccccttgtacctcctttaaatttttttttgccttccatttttttaaattattcacataaaactaaataattaaaattaacctttcttactctataccatgaagcacgtgaaccagttgttaaaaaggtcttaaaatgcagttacaataaaactcagtagaaaaagttttgcggtaatgatcatactaagaaccaactcaatatggaatatggtatatcatattcaaaaagaacccaataggtgaaactcaattgataacacacgttgagtttgtgggggaaaaactgggttagattcttccataatacatccttaaggaaggacaatcaactttaagtgtgactaagcccaagaatgaagatttgtctcacaatttccctaaaagactaaatgtgacacctttctacctcaagagacatacattcataatgattattgtgaagtaaattaaaggaatgagtagtacaagtgtcttaaaacttttgtcccacagaagaatatcacatgtgtttcatctcaaactctaaacttcaaaaatatacataaattgtttaagcatcattgacactccgaaagtcatacaaactgttaaatataactaatacaaaaaaattatgttgcaaaaccaacacaaaaaatattaaaactctagccccgatgtcacattatatcataactttataacccatgaaagttgttaaggaacaaaactaaggcccatgcccttccaacatcatcatcaacatccaactgaaccttacctacaaatgacaatcaacccaaacacaaacaaaaaggaaagaagtgatataaacgcacatcatgatcttggtatgaaatcaactcatggagccttatacatatatgtaagtcaatcacatttattagatcaacacatacaactttagattcttatggaatgaaaggcttgcctacttattctcttaatgcatctagaaccagtcaaaactcttgcaaaaaaagcttaggaggacatctattcaatggattgtcacactaaggataatttgacactacactctcaatcgagatgagaccgctagcagcaggtcaaggttatctgctttacaagttcactctaacacatgggatcgacatgggctataaggagatcccacactagataagacccccaaggcaagagattcacatgaactcattcattaccttaccaattaggctcaacaacaacttccaaaacaacttctatcatgtcatgtgagatatatgtgaagcacatggtttttcatacgtctttatcacatggtgggtcctgtcccacataatatagggaaacatatgtttcgtttcatagcattaccatggaatcacttcattcacattataagtataatatcatgctcatctcatccttcatagattttcataacaattagtcacattttctcgtacattactacgaccttcatagagtgtaaatataatatatagagttgtactaattctatcaagttgcttcttatcttgttagaaaactaagataattatctataacttatatgttgacctaaaaatctagtttacttgtttactatgcctaaaattcaaagctacaagcatggactactacctaattctaacaactcggtctttgctcactaatttgatcatatcttaagtatcaggaatttgttttgagtaagaccaaagccattggttaactgatatctatggctacatgcaactattatgaagatcacaaagtctaatttggtcatcttcctactcgtttttggtttgaacttgatgtttgctatcaagaaaattagcacgagcatgctgatattgaccatggttgtgctctacatttttgtgaaattggaagtgtaagacataaaaatcaatcacaaccatgctctcttagcataaccatgctaaaatccagcacaatcgtactccctcagattaggaaaatctgaaaaagaggataagaaaagtaagcacaggcatgctcattgaagcaagggtatgatcatcatcctacaggttgagcacgagcatgctcatcatcctacaaaataatgtgagtaataatttgtccccaattattggtaattagtgttgcataacttcacattgttttatgctttatcttggtcactacctaagcttagataagtgatggggaactttgtccaaatttaaccattaaattaaaaacttgtaaaactacgttgacctaattataatcatttatattttaaataatttatcaaatatccaattcaatcccaaacattatctctacaaatttaaattatactttaattatagatattcaactaaattgtcaatcaactcaacttaccaatatcatcttaacgataaaatttaacttcaatgtaaatcttaaatttcttcattgctaattaacatgcaattcaaccataattcctcattaaaattgaaatttgatcgtaatctcggaacacacaaagccctcccccaatataacttcagataaaaaaatatatccaaacctttaaaaatcaataatcaagtaacaaaaaattaatttccttaaaaaaaaagtaaacaaatttaagaacataatttatttgaatttcattaaatgaagtcattgaagtgttgaaaatatattcataaaacgtaaaggaagaaagagagagggaactaattaagtcattaaacacaagtagttagtattaaagttaatgttaaatcattgggacactaagttctttgttggaaataatccttagatggaagggtataattgtagttataaatgacgtcctcttccttcgctgtgaacacgcttgtgttgaaaaagtgccaaaacatttgcgctaactattctgttgtcttgtccttttccacttatcactcttcacttcttaactaacctcaagatggaaccggaagaaaccgccgccgccgccgacggaagcagcgacgaggggctgctcgggctagacagcggcagtggcggcggtggaagggacagagtgaagggtccatggtcgccggaagaggacgtcattctgagccgtctggtgagcaagttcggcgcgagaaattggagcctcatcgcgcgcgggatcagcggaagatccggcaagtcgtgccggctccggtggtgcaaccagcttgaccccgccgttaagcgcaaacccttcaccggtacgtaatcggttggaatttgaatttgaatttggttttgtttcggtttggtttaatttgatttttttcgaaaatgtaccttccgagtgtagagatgggaatgcagtaacagaaatgatttgaattttacttatcgtaatgttttgtgtattaagatattttgttttcgaagtttgatggtttcgtggttcattttttgaatttgctatgtgcattattgttccttaatggataagtcacacatttttgcttagctgttaccttatgaattattatcatgttacccagggtgatggtgttattgagatggtggttggtagttatcattggctacagggtatggctactaattgctgactgatacctgtgattgttgtttgagtagagaactctttgtgtcttgtacttaaaatggttatggcggtgtacgctactgtgtgtttggtttggtcttgctcacaggctatgcgggattttgtcgttttataagaggactcacatggattaggacttatgagaggctgatcttattgtggataggtttagtctgacatttggaaaattatgaacttgatgtcctggatcgtcgtaaattgatttctaagtgaagttcatacttaatatggatattcactatactatgatagaagtaatagatgggggcaggtgtacaataggagaaaagtcagttagtgggtctgtaactgttggttagtaactgacagttagttaattgagggagggaaattataaatagaatagaaagagagggaaaagggtttgggaaaatactaggagattggtgttctcaaattgcacctgtaacattggagctaacagcttcatcttgaataaaagttctgtttccttttcatatctgaacccagttcctaacatactatacagtgtcttgtcatgcactgagttgtttttgttatttttggttttcaacataggaattccatttataataatggttaaataaagtgtcttttgatcctgagtgctgttttttgtttttgtctagttccaacttaaaattttcagattttttggtcaatccaaagttttaaattgtgattgcagttgtggttacatcacaatcctcatcgcttcttgatcctgggttcaaaacccactgaggccaatttgcttcgtatttagcctatgttgtccttgctgacactagatcatagacctcacttttaaaaaagacggacaaaagaacaaatgctaattcaaaataaattattctccaaaattgagataaaatgggcatctcagtgcacgcagctctcacctggtggggtttggggactttgaaatcaaggagactatttcccagatttgaactcataacctctagaggtcacaaagtggaaaccttaccatttcgccaaggctcaccctcaaaatgatataatgataaataacttttgaaccaaatacactggatgataatccctgccattttgtaaagaaacccaacatatattggcttccattcattatatactttaggatgagattgtgtaatattataaaggacaaaactttggtacagtaactgatagtacttttctccaataaaattattacactggttaccaagatgtcaattttagttgctgagtgaaatcgatggctgcactgaaggtggatacttgacagcacttattgaaatgaaatatgacccttggtaatttgattgaagaacagtatgaccaatacttatagtactatatcttagctttgacccattgttaatttaatttatggttagttagttagatatttcaattctgtcatcacaggtaatactccgtctcaattgtcatactgctttttggaagcaccagctataacatattcacatcgctgattgttttatacacatcatttgttgggttgcctttaatcaacttgtgtctatatttgtgtacactgattttaggtctgactgttgactggagggatgatgatctgtattcttgttgtcatgtgtatgctgtatagaaaggacattcatcaatagaatacagctatcatgatcataaaagtgtagtgaatttaaagtatagaacatacttatatgcttatgctcacagttacacctaaaaatagcatacacaattttagattataaaactgaggtcgacaggttgtgaaagagcaactgatcttatgtatctttcatttttggaggtaaaagcctattagataatgaaaaagctcaatgcttgggataggttatatcatgtaaataactgttaataatggttagcaatgataatcaagaatgtggtattatgaatacatctcatttcatttgtcaaactgtctctgcttttgtttgttgaccattaaaatttagtcctcttttttgtgctaattttatatctagctatgtatgatattaaaagtttaattgcagtttccagcaacaattatattataataatttcagtatctaaaatgagaatccgcagaccaaaatggcctttgggaaagaatgagattacagaatcctttattaatttttctttctttttctaaaaactcaagtacctcactttcaatactaatcaccagctgcagtagcaacaacaacaacaatcatcattgtcatcatataagaatactgcgaagagagtctgttttttttggaacatttctgttcccttgtgataaatctccttactctcacagatgacttttctgcaacctgcagtaacgaataagccacaatttttttgttttgtgcaaatttgctcacctggaacaaataataactgcctacattatcttatcacacaagtcataataaatccaatgtacaggaaacatgcattccattgaaatatgttggtaatctacatcacagcatgcattgtatgccacattagaattatatgatatatttacttagaaagttttggatttcatctattaaatctcatcatgttactttcctaaagatataggcttaacaaaatacaattcttttcagatgaggaggaccggatgatagttgctgctcatgcaatccatgggaacaaatgggcagccattgccaggcttctaccaggaagaacagataatgccattaagaaccactggaattccactctgaggcgccgtggagttggacatgatacaattaaattagaatctggcagcttcatggaagatgttagcttggagaaagcaaaagtatcatcagaagacactctatcatatggggatgtttctttgaaatcctcagaagggagagatgtcagttctatggagatcatggatgataaatctgatggcaaagcacaaacagagggccaattacaccatgaagtcaaggacccacctaccctttttcggccagtagcacgcgtgagtgcttttaatgtataccaataccactcatttgatggtaagcagccttcaacatcaattccaagatctgttccaatgcaaggacccgtttttcaatcatcaaaaccagatatggaattttgtagaatgcttgaaggaatttgtggtgaccagtcagtgcctcaccagtgtggccatggctgctgtgctgctccaaatggtagaaagtccgaaagctctttgttgggaccagaattcattgaattttcagaacctccatctttcccaaattttgagttggctgcaatagctacagacattagtaaccttgcttggcttaaaagtgggttggagagtagctgtgtcaaaataatgggcaacacctctggcagggtagtatctaatggatctcaagtaaatattggccattaaagtgccaaatagatcatcattcctattctgagtgaggactggataatgggtatgataaaggctttcgtaatgacaatctattttccttccaaatgtaattaggcaatcaaagttatgtgaatcactgctataatgtggatggattcactaggtaaaaggaggttcatgagttcaaggaacaattattttgttttttgggtgttgactgattaggacttgatttgggacactgtaattgctaacaaatgttcgttgtaaaataggccaatagggtaaaattacttgcatatcagtcggttcgagttgctgctgtgaatgctgttcagtttctaagagtaattaaagctcattcgtgttaaaaggcaattgcagcttagagaaatcaaatcaatgctgaagagttattgttatatgttgtgaatcacctaggctttactaatgttgctcaaatattggtcatgcatgattttaagttccaactatctcgtgcaatgcttactaccatttaccatgctattatcattattaattactccctgctcttaaatataagaagaaaaaaaacatattattttgtctcaaatataagttaattttaactaattttactttatttaatactattatttataaaatatttttcatttaattgatgtgctagtttcaatgattatttcttactctgaatatcaagtttcaatgaagggtaagttaaggaaaaattactttttgattgaaattgatgcaattgaatggggttaattaacttttttaatttgcgtgtcatattttttcttcttatatttgagattagagggaataagtgtaatacttgtatcatacctgtcacctgatccatgtgattgatcaatataaaaattggtttttcattttagatgtttttgttcctctagttgtgacaaactttatttacatcaaagttagtgctcataataatggggtattgactaataactactcccatgtgcttattataaagtaaaaactaaaagtgtagtttgatcctttttataaggttcttaaaatgttttaggcattcataattttttcattaaagtacttttaagaaatatcaattctagaatgacgtgaaagtgagagaaacgtaatttattaatatttgttggttttgttcatccggatagttttggaagaaaaaatatattaatttaagataaatataatgcttgtagaagcaaataataaaaggagggttgaattgtgtttttagaaatttaaaaacttttctaagattgatagcacatttatcatctaatatagatagacctaaaacacttagatatcaaattgtgttaaatgatgataaaaaaaaaaagttttctttttaaaacaaaacaagatataaaatcttgtagaaattcaaggaatatcagtggctaattattataaatatcataagtttatttgtttccattatttccttttataatgattgattttgtagttaattagttttcttttttactctttgatcacttgtataatttgtaatcgttccttttagtgtaaatatatgaaaatcacacattttgcacatggtatcaaagcaggctttcgttcctaaccttcagccaaggctaaaactggtttctcgctgtctatattcttccgccatttttttaaaaaataaaccaccctactgttttagccaaaaccatcagttgtagggcttcaatcattaaactgagggcaccagtcgaatcagcacaaaaatccgagcagaattgagccgatcccaacaccgaaatcagctccacgtgccttcacacaatccttcggcgcatgtagcccacaagctgccttcccgacctccgttctccgcgcgattctccagaacacattgttgttgcctcttttatctgtcttgggggtcaaatcactgttctgcgtacttttcatttgtgggtgtttcttttcttcatcattgtgttaattacttcgtcactttcttttgctagcgactctagatgggatggacatccttggtgcaatcactgcaacaaggttggtcacacatgaaaaaatgttgggacattcatgacaaaccaactaactagaagcctaaggggtctaataaaggtcgagcttatcaggtttccattgaagacaaacctaaagaacgtcacaccacaggtgactctaatggcatcaccattcctctatcccagtatgatcaattccagaagctcttacatcagtcctttagctctcaacctagcaccaccactagccttgtagtccaacaaggtacgactcttcatgtccatagtagcccttgttggatacttgattctagtgcgtctaatcacatgacatgtaatccaacactgttttgttcttataccccaggcttgagacctcacgataaaactagcagatggtagtttcacacatatttctaggaaaggatcgattaaactcttcgagaatattatgctgacttctgttatacatgtccacttcagcttgaaattttatttctatcaataaattgatttctggtctcaattttcatgtgacgttctccattcacaattgtgtgttttaggaacaaggttcggggaagactattggtagtgccaaggaggaagaaggaggaatttactactttgaggatgttaagtctcaagcaacctttgtggagaatgattctgcttttgtttatgattctagcactaatgtgatgttgtggcaccataagcttggccaccctagtttaccttattttaaaaaattgttacttagtcgtttcattaataatatcatttctttatcttgtgacatttgtcctattgcaaagcagtctcgagtcacctatccacctcgattctacacaacatcttcccctttctccctaattcatagtgacatatggggtcctgcccgtgaaaaaaatatcttcggtactcgatggtttatcacctttattgatgaccataccagggtttattgggtctatctcttgaaggaaaaatcagacactgaacatgtgtttcgtcagttccatgccatggtttagactcagttctccagctctatcaaaatcctccgcattgataatggtaaagaatatttgagttctgtccttggaaaattcttatcccataatggcattcttcgccaaagttcatgtcctaacacacctcaacaaaatggtgtagcagaaagaaaaaaccgtcacctactagaagttgcctggtcccttatgttcactatgaatgttcctaaatacttatggggaaagttgtcctcactacatcatatcttattaatcggatgccttctcgtgtcctagggtgtcacccttatcatgtcttctgacctcctttccgtctactcgattaatctcaaccctttcaccttcagtgtttggttttgtttttgttcacacatctcttaatcacaggtctaaacttgacccaaaatcccataagtatgtcttcattgaatattctcctacccaacgaggctataagtgttattccccgactttgagtcgagtatttatgtctatgaatgttcagttctttgaaactcaatcctactttccccagccttttctttagggggagattttgatgaaagaagaagataagtttgctaaacttatgaaactctcaacgttacatcattgttcttaatcaatagtgttgcattttgatcctttcctccatccaaaaacagggggagatgcaaaaccacaaccacaacaccaattactggtttatactaggagacatcatcctcaaaatgtaactaatacaaaacctctacactaccaagaatccactctcgagtccagctgcatcggacaagaagttatgaactctgatgacttgcatatttcgattacagtaaggaaaagtactagatcatgcactgttcatcctatttctaaccatatctcctatgataaattgtcttcaggtcttcatgcattcaacacaacgttggataacataaggttactacaaatattcaagaggcacttgctgatcctaaatgcagacatgttgtttctgaagagatggataccttggaaaagaatggaacatgggaaactgtgacacttcccagaggcaaacaaatagtgggttacaagtgggtattcactgttaaatttaattcaaatggcaatattaacaggtacaaggtaagattggttgcgaaaggattcacctaaacatataggatagattatcaggagacctttgcaccaatagctatactcaacaccattcgagttcttttttccttggcagttaatcttgattggtctctacaacagttggatgtaaaaaacgcagtcttaaacggtgagttgcatgaagaagtatacatggatcctccacctaatttcaagaaaagagtcgacaaagtgtgtaagttgtgaaagtctctttatgaacttaagcaatccccaagagaatggtttgaaaaattcactcaagcagttaaagggaaaggatttctataggctcacaccaatcataccctctttcacaaacgttctaaggatggtaagattgttgttcttattgtttatgtggacgacataattattaaaagtgatgactatgaagagcttaaatcgttaaaaaattatcttgtgaatcattttgaattaaaggatcttggagctctcatgtactttcttggtatggaggttgcacggagtaaaaatgaaaccactatcttccaaaagaaatatgttcttgacataaatatatttatttgcatataatcaaaataattaagagttttaattcatctttaagacaaagtcttttgacttaataatgctctcaattaaattaatagtttttttaaatctcaataacttaattaattggaccttataataaggattaaatggagtatttttcttgcttaaaagccactttgcaagatgatgtaatataaaacttgaaataaatctttttatatgtcttgttacttttaaaaatttaatttaaatgcattgttatctgaatatattacagtactaaaaaataggcttttaacattgattattttggactttcaacatcgaatttagccaatgttgaaaccaccgacgttagacgtatcaatattaacatcgatttttcaaaaattgatgttaacatacactatacaacattggtaattcccaaaaccgatgtcgtatagtaaaaaaatacaaaaaaaaagaaaaaaacaacatccgttttggttaaaaccggtgttctaaggtgagaaataatatcggttttgaaaaaaacgatgttaagttgtgtattctgaaacactttctacatcgtttctgaaaaaattgatgtacaaagttcctttataacatcgattttagacgaattgatgttgattttggctatttttttatattttacccattttcacaatgaaccaaccaaaattaatttataaaaaatattaattttaaactaaaatattaaaaatattatttttattacaatatcacattacttaaaatctaataatattaatttagaaaacgatttaaataatagttatcagactgtaaggtatacatattactcattatcaacttactcacatatatatcttaccacaaaataagtaaaaactagattttttgcatttgaaaaaaaaaaaaaaacatattgtacaaatatgcataagatttttttgcatatatatcatatgactgttatgatatcctaaatgtctagctggaaagcaaaatacacaaaagagacaagaaattatgaatataaaagctaatataataaacataaatatataaatatgtattacataggaaggacaacaccaattaattaataaataaaaagaactcttgttccaaattaaaaatagatagaaaaagtctaaagaaagaaattatctctacaaaaaaaagaaatgatgatcctcacacacacacaaaaaaaaaaaaatcttagtgacaaaaagaagagaataatcttacaacaactcagatatagttaattactttatctttctttcattttattagaatagcagtagtctcaccatcatattttatattgatctctaatgtgaaaacttttattacatgagaaagtaaaattaaattccaattatgaatatagattaatatgtataaaaaatctttcttattgaattatatattgatcttgctcataataattgattattgttagttcaagagaattttgcatatataaatataataagtaatatatgtgacaagaagataaataaagaaaaataaaaaaagaatattgatgatctattcaagatatatataacatgatgtttaaatatcattattcttattttaattatgttttattttaaaattatataaataagtgtttatgtttttcattaataaaaaatcatgatggtataacatttaatacattaaccattaaaagttttagatgaaaatatttgattaaatacactctacgaatataaactactatttttttctaataaaaaaatctctaataattcaatgaagacaataattagcaaaaccatatctattagtaaaattagcaaaatagaatttagttgtttaagttgggaaaggggcatgataatgactaagaattactaacctgtacgtcagcttgtttacgtccatcatcaccagagcaatgtttttgggagataatagctaatgtggtagtataataatgtttccaatgattaaaagtggttaaacaaactataactattatttacaatgtcatgatttgtgactactaaatacattgttctaatgattttttttttctcaaaaaaatagatgtactattataagaaaattggttataaaatgttagcgttttggcgacaaatcaagatacttaaactgctttatacaattgtgtcattttctactggttgtgtaagtgccaaataataacttactgttatggacatagtgataatgataattacgaacacaagtcatcacatattcatgtccttaaattgaataattaattagaaagaaattcaaaactttggagatggtaagtgcagggctccactgttacttctggatatcaagacaaatgcttccattgctattaatgtttggatgaaacacctattaatgtttggatgaaacaccttagttctaaatgcaacttttattctgtgttcaagttctctggaatccaacttttattttgtcctcttgctatgattaccatgaccatgttcacaagcattacatagttaccaagagaaattgaatcatgcaaagtgagctcccaaagctttttatgccatctgaggcttgctcattaaaggactccaattgaccaacatacatgaaaacttctgaagcaccaaccagaacatactgtggtatttgccaaaatatgctcaaggaactagtcttctggccatgactaatacgtctcaaccttgcaatctctgtggcaccagatgcaaccatttccaacataccaataatcagacaaaggacactgcagatgtcaaacgcggacatgttggtacattaatataaactttaagaataatacatacattaaaaatagaattttatataaacatgacaaaattgtatgaatgataaaaaaaaaaaaacaaataagcataatttataacatttaaggagattaacttcttcagcatgacaaaagaatagtatcacataatagaaaactagaatatctaaatgttgtaaacatgactatgatatcacgttttaacagttaaaatagcatcatttccttttccatcgtcagtgaaaagaaccacctctaaatctggtttataatccaggaaagaatagcttattcaagaatgtcaacccactcaaatggatcacgttcattaccattgtaataccttgaattttgagcataggagtaagcctggattaagcttatgattaagaatgataaccatacattagaggccctaaaaagaaaagcattaggcagtttcagccaactcgcgcgatccgcgtggagtctcgcgcgatccgcgcgggaggtttgaataagggtaatgcttgcggccttctgacgctattagcgtggacatggcgttactcgcgtggctggttcgaacttatggcgtagtcagcgcggggcatggcgcgatccgcgtggaatggttgaataaggccaatgctggcggccatctcacgctattcgcgtggctgtggcgctaacagcgtgagttgttcgaacctgttgcgcgaccagcgcgggaagcttggattaggccaatccttgcggccatttcacgcgatccgcgtggatttggcgctgatggcgggggttactcgaaccatggcgcgatccgcgcggcacctggcgcgaaccgcgcggcacttttggttcagttttataaaagctcattttggacgaaaatcggaaaggaaaaagagggagagagagagagagaagccattgatggaccattgagctttatatcttctccatctttcatccaaacatctctgacccaactgagaaagtgttcagcgcctcgagataagctagagacccagctttattctcgacaagaggcggtaaacggcgagatcgagatttctaagggagtccctggaatcgaagaattagaggcgaagaaagctttgattgagcgatctaccttagggaaagtgattccctggtgtgtctgaactacacagaggtaagaaactcgagccttagccgttgattctgtgtttgggtttttggttggttttgagtaccttgagaggtgtttttgggaggtgttagagccgttatcaggcttggactctgtagagttttgtgttcagaggattgctctgatgaagtttggttttggctctgagtatgtatgagtagaggtaaaaggctgattatttgactagtatgaaccttagagcagttgacaaagttgctcatgagatagaatagatgttgtttgtgagctggaagtggtgatattgagaggtttgaaattgatctggataagcagggatatactttgatcagagtcttagaagagactctggagcctagtgtaggctgagtaggatccttctgaggatctgagaatcacttgtgaagtgattgttatgagttatgtggaaggaattgtagtttcctttctatctaacggcttaggaccgttactgatacaatgtgtatttggtttctgtaggacgtgagcttgatagttctagtggtggtgaccacgaggccgggagagccggtattttgcctagagcaggtaagctcttggttcttgtttatacatcctttgctgtgttccaccattatcctattagggtgatggttctgtgtaatgatatacatatatgtggaaattgtgtattgtttgactgattgctgaatgttgtgatgtaccctgtgaaagggaattgatgtgcattgatatgtgatgctcgttctgtgagctacaccctgagattgggtgattgatatgtatggccatggtctatctagcttattacctgcatggttgattgttgtatcctattgtagtaggataaatgacatgtgattgagtaagacctgatgtgagatgttcctgtgatatagacgtagcctcccgaatggagatgttcctatatttacagatgtagcctcctcaggcaattgtattgagataggttggagatgttcctgcgatatagatgtagcctcctggtggagatgttcctatatcagcagatgtagcctccttataaagagatgttcccgttatatagatgtagcctccaagcgaagatgttcctatatatacggatgtagcctctgatagatgtattgagatcctgccatgagatgttcctagtatatagatgtagcctccctgggcggagatgttcctatatacatagatgtagcctctgcaggatagtgatgtatatgatatatggctgtatgccatgaggataacctgattgttgtcaggtgaacatgcattgaggatgattgatttaatgattcactgatgttgatgtagataatgattgtttgatatactattttcatatatatgtgtatgaaagtgaaccaggggaaggaaatacctgcaagggtcctgagtttactgaaattttatatctcaccccttgtgtggggcttatgttttgcaggtgaatcctcaggaggagctgatagatcccaaggcaagaagcctatgcagggatagctgtactttgaaaccttaggcatagatgatttgagcatgtgactctgattttttttggaattctgcctttggtttagttatcctgtaccctgagcggatatatttgtacagttttgtacttaaacacagattatatgtatattcaccatattatatgtacagtgtttatgatagtgacctttgatgatgtcgctcttagtttatgcttccaaacagcttaaactctgatgtttatatgtgtgtttgttggttaatgcttggtaatgaccctggtgattgatggggcgttacaaccaccaccaatatctcacatgttgctcttacccccattataactcatagtcaccttcagtgcatatgaatagtatatatctttataaatcaatcggtcatttcaacaaacaccttcaatgcatagtcacttacaacaacaatgtagttaatccaagcataccaatatacaatgcctatagggatgattatggaaaaatgaaatgaacctataagagtcagcatctctgttgaattcacacaaaatgaactccttgtcgcattcgacatcgcacaaaacctgaaagttggaaaaacaaatcctgagacaacattcattagaaaattaaggaaaaatttaggacaaaagaaaaaggagacctggaggggctgatcgacttgagagaggagatcagaggagtggtgaggcataaggctcagaggctcagaagctcagaagctcagacagagttgtttctgtgtgtttcggcagaatcctccacatcagtcccatcgcagcttctattttctctttctctttcacaacacaaacacattcatacacagacgtcgacgcgagtcaggcacaacaatttatgtctacaccttgggtaactagtccgaatggagagaacaacttcttgagttgctcctgtataatgtaaaaggataatcctgaaaaatgaaatgaagcaatggtgatggaggggttgggcttgaatttattgaagagaggggtggagagaagaaccctaactatggacgaagagctttgtcccggttcttgtgacatctccactttccgattgattttaatgttccattttattgtcttgtgtttcatgatccaacgttctaaaaaacaaatctattgttaagataatttcgttaagatttgtcttttgaaaaaaaaaaatggatgttaacattaatttttcaaataccaatattaatttaagttcataataatagtaataatagatgctaacttgaattcgttaatattgattttaaaaaattgatattaacttgagttagttaatatcaattttttaaaaaattgatgttaatgaactcatcatatttacaaatttatcaccatatttttgttaataatgttacaatcatttttttaagtagtgttagtatttttgttaataatgttaaaatcatttttttaagtagtgttagtattttaaatctacgatgtataatttataggttaaattaatctacaagttttataattatttggtagttttttaattagatctataaattattttttaattagattcttaaatttgtatttattttttaattaggttcttgctaggacataattaaacttcatagttcaagaacgtaattaaaaattgtgaagtttaagaacgtaaataaaacggtttagagatgtatttaaaaattgtcatagttgaagaacataattgaaaattgttaagcttttgcagttcaatattttcaccttgttggccagtattctcacatatgcagctttgtaagatttaaattcaatattctcaatccgcaaaagtttgaactaaagacattgaaatagataagaggttaaaaaaatctataaaatgtaaaaatgcttattgtttttgctaaaaagtaaaaatgctattgtccaagaaaaataactaaaattattgttgaagaatgacagctaaaaatccttggttctctagttatttaaattatatgtacattttttttacatttgcaatgcacaacataaatatttgttttatataactaaaatttataataaatatatacttttaaatatataagttacattataattaaatttgtaataaataatacttttgagcatatcaattatattttaaatttgtgataaataatttataatatgatacaatattatttttaaattttaactattgagaattatttttaaaaaatattaaaatttgatttagagataaagatgaaaaaatagattaaaaagtaagaaaactttataaaaagactcttgaaaacactcttctttttcggtatatttataagaaacaagttagtaatgtataactttatattttttcggtttcttttgtatgattttgtatgatttatatattaaatcttgagaactatttgaaaaaaaaaagatttaatatataatttttatttaaaataataaattttttccgtatatttataacaaacaagttagtaatgtataacaataagtaagaactatttgaaaaaaattaatatttcaaataaaaattatatattaaatcttttttgaaagaatatattaaatctttttggaaaggatatattaaactttttctgtttaatatatgatctttttgctaaatatatgaatttctaacatataagatattttgttttataaaagttaagatcaaataaatttttttaggtttaaaactcaaatttcatttatgagaacaaagattattattaataataatattatctattgataatcatgtgtatattataaattctttgatatcttatttaattttttgaataaaaatatattatttattaacgattgtggtgagatgctataggatgatactgtagggtgcacctgaattatggattggaaaagctgaattagtagaagggcttaattcttaatatatgttattcctaacagaattatgcagacgatcatgattgtgttgctcagcattagttcctagcatcttgtactgcttcttcactttcttgtattgcattttctgtcgctcatcattcaccttcattatatgtgttccgcaacgagagattgagaaatttctgttccaattttatctcacttcgctaaccatggtcacttactacataattattttttatcattcacttactacataattatttttatcattcacttactgcataatttaataaatttttcggttcattaggagaaataaatatagactaattgagagttgaatcgagatataaataaaatttgataaaaaaaatatttatgttataaatcaaatttaaataatattcgaacaattcaatattaactctaacacatcaatcatttataccaatcatttgacttaatatttttaagttgataagtaaaaaaaaagttatataaacataattgtttgcattcaataaaaaaaaaaaaacttggtgtcgagcataagtttgaaaaaattgtgtcggtccggtctttttatttacttacatataactttttaagaatttttttaattgataatataaaataaatttatattatcgttcaattaaaaattatcgatataataattttattaattcttataataattattttaaaagtcatattaattataattttatttattaataatgtaaaatgttttatacataagaactctattcttttcaaatttcaataaaacttttgcatatacctcttttggttgtagatatgagaaatcggttttgtgactttcgtttcagatttggcctatatagtgtccggtcttatgtgttcgttttccttttaagagtgttgtgttgttgccttcgaatacattgttctgagtgacaatgatatatcgagtactttacatgatccactatattccaattactcaaacaccacgtataaagttgcttcaattgtctttttttaaaagaaaaaaacgaaaataataaaaagttgcttctgttgatagccgccaatctccagatgtacacttatatagcaccagctgttttttaagaaaaaagaaaagaagaagatgtataaagagtttgtaacaattattttgaaatttcataacgttttctttatgacatttatgtccatctttttaattatatgaatttaacttttaggggaaaaaatcattcttatctattaaaaaaatgaaattaaatttatcagaggaatatgtaaagtttaaattaagtatttataaaagaggaagaaaaaattagggaagtaaaacaaattaaagttttagcaatatatttgttagcatgtacctattaatctttttagagataaatatatatctattagtttataaacttattgacatgtttaaggataagtccatcaacttatttaaagtcttaatataaaattgacctttaaataaattattacgttgagacttatataaataaaaaaataggtcaaatatttttataaaaaaacctataataagttaataggtcaaaactgagtcatgagattataaagcaagtcaagttcaagcaaagccaacttgatttaacatatttccactcttagttccaacaaaattatggtatttaagtgaactttaaaccatatacaattagcttactatatttacattatctaattatttttatttaacaataatataagcattccttaaggtaaagttcttcccaagtctcagacaggaactgagaattcatcacattcgatcgtaatagccggaactagaatggcttaatgtgggagtgtatgtgcaagtgcaaggacaagggagatctgcctgatatttattaccttagagttcacaagggccttacatttcctcgaactttttcctcgaacttcatgcattgatcacattacattagttctaaaaaaagagatataagattggtatactgttgaagggaaaaggaaaagggggcaaggggcaagtgagatcgtaagtttgaatcctcccattaacaaattctaataatactaacaatagacatttgtcaattataaaaacattattctaaaaaaaatttctaaactttaggtgcaatcgagcacaataggtaggaagcatgagttgttaaagataacatatacaatgcaaaaaaaaaaaaaaagaatacaacaattataacaagaaagcatcatcatcacaacctattgtgcaatcgaggatgaaaatactggaaagatttataccaattggtcatgagcaatcataaaagtgaatctgacaccacaccttaactcaaaaccttaagacttatgtttatgggtattatcctcacttatatgatgttcaacattctcattcatacctgatacgagtttcttccacatggtagtctccccctcaaggaaattcattttcattcatgaatattccatgatggcccttagagcttaaccatggttgccctaactcgcttagccattgtcattaatatgctctaatatcttgcatcgctacaacacctatggggcccactgcttggcctccatgtatgaactcatctaccacgaacactttcgtttgggatgggtcaaacctaacccaatcaaatttgaacgggttggtatgggttgatttctaagaaaaaacttgaaacccaacttaaaccaactcatttgtaaatgagttgggttgagttgggtcaacaagtcaaagtatttaaattttcttgctattgcatttaaaattcaatgttttttacaagctaaattttttgttaacctttattgcactattccagtgtgtttccgagtttcaacatggtcgaggtgtgattgcgagttgtgactgagtgaggtgcaacgagaagaagatgagagttgaaaccctagttttgtgagagtgactgagtgaaatcatgagaaactgagaaaagaagagacagactcattcttagttattaagtttgataataacagtaattgattttctaaaatttaaatatatatattataaataataattcaatacaaattaaagagtcaacaagtcaagttagtatattaatgggtccaaatattaaatgcatgactcaacccaactcaatagatttgaatgggttggttcatatttgatccaaacacaaaatacccaactcaaactgtttgggttaactcaaattcgcgggtgacccgtacccgtaaacaccgctaccaccttatcacaatcatgattgtaaaagatttgatgagaattataatgaggacttagacttttagtttttcttgtcactatttatttatttttatattgtaacttttagatgttgtgataacattcttgatttctatattataatttattattatattttatttatttatttatttaaatttattttagctatcttaatatgaaataatactcaaagagttatataatttaaattaataattattatattttttaaaattattaacaattattgatgactatggataaagattctcataaatctgatggttattaataaacgactaagaatagacaataaaaaaaaaatacaaaatgttatgtttggattacaagtgaaatagaaagaaaaaaaaagaataggaataaaaataaataaataggatgaaaaggatgtattatttaaatggatagaaataaaaacaaaagaaatgaagaagttttcttttaagtgtattggatgaatggaaatgaaactaattaaaaagaattatggttaaataagtttttgattttaaactattttagattttaattttacatccttttaaaaaaattgtccatttttaatccctatcaatttttagatgactaattttaaaataaatatttttcatatacaacacatatatttcacaaatcaatctaagcttaacccaacaacaactttactttagattcacacaacaaaccttgtgcacaaaaaccactactctaaaagcaacaatccctttactggctacttctcttttgagtttctcactcatttggttctaataggaacaactcaaatgttctcccctagatgctcacttcaatgaggctacatagagtttggagacttacatatactctctaagctggacataaggtggactctaatattaaagtgtttgacataggacttttgtaacaccccatgtgcacccgacgtattaacattaacacaatatcagattaacacagcaagcatagtaataaacaataaaggaagcctgaatccagtgtaaatacattttttgtacatatatggtgaatttctgtcatatacaaggtacatttttctcaaaactatacaaatattccctaggtttccaaaatacagacaaagtaaacaaaatgtgagctaacacgctcagtcatctaaacctagggtgatccatcacactatcccagctcaggcctcttgccttgggatctctcagcaacctctgtattagttcctgcaacatgagccccaaacaggggtgagatactcatctcagtaaactcagggttctcggaggtttccctccccctgattcactaccaaccatatatatatatatatgtatatatatatatataacataacagaaatcatagcaaataatcctccatcatacagtcagccttcacggctcacatgaataagctgcatgcacatagcagcacagtacaaacatacacaaccaacacacattgcctgagagagatcatccactgaagggcacattccctcaggacttttccctgagtacctgagtaagatcatctactgaaagacacatttactcaggactctccctatccatgcttgaggaagatcatctaattaaaggtacattccctcaggacttgccgcccaatacctgagaaagatcatccaatgaagggcacgttctcccaggatttacatggacgcatatggattgttccaaggaagatcatccactcaagggcacattctcaaggggtccatagttccctattctactggccagtgaattctcatgcattcacatctcacagcatcattatcataatcatctcataacaaaatccatacaagcatacactatactagtgtaatcaatacaagcataccctatctcagggtttagctagcattcaattgccagcatgccatcaagacatttcatcaacattcgatacatatttcagtattacagcctcatacaacatcagcatgcaagatatatcaaacaatcacccgttttggttgtagtgaaacacaagcagggaaacattccccaagaacactgagcttacctgttctcatctcagaatcagctctcctagtctcgtggtgtcctccaccagtgatatgcgtctcacgccctacaataggcatgaattagacattcagtaacggttttcaaccgtttatatgaaaggaaacattcttcctttctttatcagtttctgtcttctaacttaacattcatcttagcctagcttctactaggccattcatcaaccctcagtggtctgcctcagtctgactaaggccttggagtctcttcaagactctgtacaacccaattcaaggttccattgataccaaaaccaacagttgttcaactcagctagaacaaatatatcaacatattttcaccgttcattgggccttatgaacaactcttgtaaaggtacttaagttaatacaggccatagtacctcccatccacacccactctgctttctctcaaatccaaactcaaacttcatcacaaatccagtttcagggttccatatctcttagaacaatctcctgactatacttttctaaagaacctaagcctaattccagccctataatcaatgagttactattcaccccattacccatttcacaattaaacggttaaaacgtgagtttcttacctcaaattggtcgaggaaggctgaagaagtctttctcccaactcctgtgtccctgaactgcccttttttcctctcccaatagacagttctctgaagaaactcaaggaatggggtttctctcaaggttaggctgaaatttggctcctaagtggttcaattcaagtttagaggtgattaggaggtgtttttatggattatgatgaaggtttgaagctcttagggtgcatcaatggctgcctggggtcagggaagaaaaggaacagtgcttttcctctaaaaatcacaaaatggccttttataggtggcccgccagaggtctggcgcggatcgcgccacctctggtgccaacaacaccacaatgccggtggatgtggcgccaacaacgccattctcgcgccatcagcacagacatccagaaaccttcacgcccttagccccattactggcgtcatcagcgccaacttccagaggctgtggcgctactcgcgccacacctggcgctaattgcgtggaaaaccagagaagatgggttttccaggccacttcccgcgccactagcgccacttttggcgctatccgcgctggctggaaaacttgtggtgcccctcgcgccactttggcgcttcaggcgtcaacttccagaacatctggcgccacacacgccaacctggtgccaaactccagaacccatggggttgctccagtgttctggcgccctaggcatcaacttccagtgggtttggcgctaatcgcaccacatctcaaacacaggtttctcactgagggacttggcgctacccgtgcgaaatccagcgccaaccgcgccaggtctcaggtcattataactttcttttcagaagctaatattttttctggatggcttcgaattttttgagcttatcccttcttggctatttttcttcctagcaactaactcctttgaatgaatgtctttttttataggctttgtactaattgtttatgactttgggagagaattttaaagttattcaaatattatatgagctttctctttcagacaaccatgttttgacaatttttacttgtgatttatgtagcttttgaactttttcttgctatattttatttgtttctccctttttcgcatatatctagcacattttcaaattttaattgtggcaatctatcgatgcttacttttgtcttagggattaccttatgataacttttggtacttgtcacaggtgttgtgtaacgcccttgaatgtcgacttcttggcggctcacacactacaacatttcacatggtgacatttcactcaacatgcttgttggtcataaccctccactggttagaacccttcgttggtagccctttttaagacgtcgacaatcatccttgactgttttcaggatcaatgactgttcccacaaaccaacacgagacttttcaggtgttttgtcttcattcatatgcttcctaggaatcttctcagaaggtcacccatcctataattgccccaagccaaacacgcttaactgtgaagttcttaagtgatgggctaccgaaaactacatgcatcttgttaatataatattaagttaaaagacatttatgtcttaaagacgaatcaagactcctaattattttgattagatgcaaatgaatacaaatgataaaatatatgtttgatattatatcagatcatgatatgtatctgtgcgtctgaagtttcaaacgatgtattcataagatgatctagtatagcatttaagtagtgcatttaagaccttcatttaataatcagtgtctaagatttttcatgtaaaaaacattgtcctaggatatgtcaaagtcctatgaataataaaagaagtccacgatttggaagacaatggtcctcatcaaaagacgcattctattgttacagacttgctataatgaaaaaaaatgacttcactactggagtataaaggcatgttaacctatcagcatatactttgcaagaagaaggaatgtgcatttaattccaacgaactcaagacttcagacgaagaccaaagtgaagaatccaaccgttgtgagacaacggatacatggagatgaagtctatatatagaagaaactttgaagaaacaagacacaaatcaactatgcaatcttattatttccttttttttcctataaagctttctgtaaattcttgtataccttgagagaaaagactaaaagtgttgagtgatatatccatctgcaagacaatcacatatttagacagtgcaatcttccaacaaatgttttgatttgtttagaaccagcagtggcttcgtaggacaatgaatattgggtttaagtcaagcttgggatagagcttgcaagtataagagccaaacgtggcagtgaacaatacttctaactttgataaattagtagaaactttgtgattgccaagatgtagacgtagtcttgggtttaagacaaaccaatattattctttgtgtgcttatttttatttcttgaaatgacaaaaggtttgaatttgtttttagattttatatttgcttttgttttataatgaaaactatttttctcattgcctgataaagtctaaatcaaaacctttctaagctttaggtttatttgcataagacaataaacatgtttttagtcttagaaaatttttaaatttataaaacacaattcaacttccttttcttatgttatttgcttctacaatttggtattagagctcagcctttaagggtttagcacttaacaatgtgtagaggaaaaatccatatagcagataactaacactggttttgaaatacaataaatcacactagaagagaggttgaatagtgtgttagtcaaaacataaaacctttttgaatggaagatgtttatttaataaataggtttattaaaaacccttgtccagtaactaagttaaattttcttaagtacaggtggactgtcgttcaatgatgtataaaacttatttttcaatgaaaaccttttatgtgcagtatgtatcaataatggactttgaaatactttgaaaatataaagtaaagtagtaaaaatactactttttatacttgttcactcaatctaagctacgtctagttctcttttaccagccagtaaagggttccattgataagacttgattacgacaagtattcttttcaggcacttttgacttacaagtattcttaaggccactacttgtagaactcttagactctccctaaatctaagaacacccaaatattgttttgtcactaagccactcttggctttcacaaatataagtttgatgtagaataaaaaattctttataacactcaaagagtggatttacaatgaagttataatctctcactagtactttgtatatcacaaaggatgaactctcttaaactcagtgtgtttctcaacaaatacttttatttcctcttattcctagattcacgacttttgtttttctgtacatgttcgttattgttcttcaaatcttgatgtcgtatttatagagaaactcgtaattatggagagtatcttcaggactgaataatatgaccgttgtgtagcttgatcttgtttcatggaataagtggatactacgtatctttgtctaataggaccaagactttccatatctgtgatttataactcaatatgattgttagacatatgaaaggaaatataagatagattcacatatatgttctttttaagcaaaatcataagcgttcatattctaattggtgtttggttggactagatgaaaacttcctgcttcagtagacgaggtatccactaatggataagtatctcttgtgttgcttccagtcatcaaacctgttgacttacatacaacataatggttaacataaatttttgtcttcgttttcatcaaaaccttaataagagcaatctaggtcgtcaagtgatggattatacaatgtttaataagttcatcactggggtagaatctttcataatgccaccaggcttcactgaaaaagaccacccctactagaaggacaaaattgagatgtacatcaagtctacccaatatagaatctaccttatcatcactattggggatattcctattcccaaactgaagttgaatggaaaaatgatgatctggccattgtggaactcaatgcaaaagctagatataccctaacatgtgccctatcaaatcataagtacaacaagatctgaagactaagaattgctaaagagatctgggactcattgagcataaactatgaagggactgaagatgtcagaccaaggaaagtcgtgactctggcttgacattatgaaagcttcaccatgaaggatgaagagtctatggatgacatgtttggaagacttcaagttcttctaaacaatatgaaagctcttggacaaacatactccatgactcagataaacctgaaggtgttggacaattttcccaaggtgtaggaacccaagaccacaaccatccaagaagcaagagatttgaaaaatcttgcatgggatgagttgttgggactcttaaaagtccatgaagtccatcttcaaaaataggatcatctgcaaaagaagaattttgtttccctcaagtctgaagaggcaagtttcatgaaagaaaagaagaagagcttgtccaaagctctaaaagtgaaaatgcaagaatctaatggctcaaacaactattgtggaaagttcaaacaaatgatgaagaagaagaaaaaagttgcaataatcctctaaacgcaaggattccaaattcaaaaagaaaaataaggaggagagcaatgagattacctgctttgagtgtagaaagcctaaacacatgagggttgaatgtccatagctgaagaagaagagatattctagggacaagaaaaaaaaagtctgatggtcacttgggatgactcagatagtaagaaaagtagcagttcagacgatgaacaagccaacatctgtctcatagaagatatagacgataaggtcaaggtaaaaacttgttctgaatctgatatttcttcttgtgcttcatcagatgatgaagaggatattccctatgattttcttctttagaactgtcatatgatttctcttcagtgtaaaaagtttaaagaaatattcaaagattctgcttctaaaaacattgatttaaagaaatcaaatgaagacctaaaagagaagatccggactccagaagagagtatgagcctggcgagtaagacttatgaaacttccattgtggaaaaactaaaggaagaagtagcatgtcctactaatgacttgagaagtcctttgaaagttcaaagactctcaccactcttttgaaattccatcaatatccccatgataagtctggtatgggttttgaaaaagggaaaacatcctccaagtcataatttgtttcaaacaattgtgactttcatggtaaatctagacattctaagttcagatgcacccataagaagaaacagatgtctaagggtacaaactatgttggacccaaaaagatataggtaccaaaatctataatagtgttcgttgcagatatccttggtaggaaaaggttatggtttaagctggtacctggatagtggataatgaggatgatgataataataaccatgataatagtggtgatgatgatggttgtagtggtggtggaatttatcaagaacttgtatcctcgccacatcgacaaatggctagatgtattgtttctaggacaagagaagggagaaaaaatgaagtccaacaatcttgaagagttcctagacaagaggagggtgaccacatgaagtgcaacaggtttgaaggattcaacaaccacacaagagaagatcagttttctatgagacatcatcccaccactaactataaaatgttcataatgatttgtaagatatcttattgttattataattagagaaatgttatgaacacactctttgccacactatctaattggttgaaatttatttaaaatgaaaatttattgggtcccacatcatatttaattatcctctctttctcttgattttgttgctttcaataaattttaactaattaaaaagagtgtgtttaaaagaatgcgctagttattgatgaccatgacttgaagattgaagaagtcatgttgtatttctagttttgataatataattgaatatgtaaaagccttgtatagtgttgtttagtatgaacactagttatctttaggtttgctttaatcatttgattgcatgaatgtgtgaaacatgcatcataattggtttgcatgatgtgatctctaagtcaagtaccctaaattgaaattgagtaactagaaactaaaaattaattttggactgaacatcatttttgagaatcttatgttttgaatcaagaacaaaataattgatcatatgaacaatataattaattatatgtggcttagttttttttaaaaattgtgaagatatgtaaataatcgattattttaccctgagaatgggtttggattgagcattttaaaatttaagagaaattaaaattcaggaaaattaaaatgcatcagttaaaattcttagatttttaaaattccttgtttggataaaccaatttaaattcctttaatttcaaatttcatgtttggataaaataatttaaatttcttatattttgaattctttgtttgaattaaataatttcgctttattatatttcattttttattttttctccaattatattttaaaaatataaatggtcatataaataattctttgcttttttacacatatatatttttagacgaagcctttcagcactcgattttcgatgcgatcatacgtgaagcgcttacagttgctcacaccggagcaaatatccatggttttgagaacgggcttcaagaaccttctccttgttctgacgaagaaattctgatgactctggttgatgtcgctcttatacttggcttgtcggttgccggtaacctcgagaatctcattgaagaggaactgttctctgaattggacgaatctttcggagcaatgaaaacaaaaaggaaggtggtgatgagttttatggaaaataggttagattcgattggggaagatgtgagggagggtcgagcgagtgagtgtgagtgagcgagagagggtgagcaacaattttcaaattctctctttttagtcaaaaattagagttccttaattttagttaacttaaatttctgtttaaaattttttgaattttaaaatctttcaaataaaatattcaaatactgaattttatcttaaaatttttttaaattcttgtttaaattactttctccattttaaatgctccatccaaacacactaggaaaactatcatttcgtagataatcgattatttggaaaaagaattgagtattttgatatttgtgttacccaagtaatatgaagcatgaaataattgattatccttacgaataatcgattatcttagtttttagtctatataaactaagttgtgatgctctttatctgtgacaaccattttgaaatttcatagagtttttcaaagcatagtgtgtaataaccttgaagattcatggcttgcaacatcaaattcttaacttgaagaatccatcaatcttgcaatgagaacataaaatgaagattacaaatacattagaataagagctcaattttcatattattcactcgggtgaaatttttttttcttatctttgttgtggaagaaaataacacaagaaggagggttgaattgtgtttatagaaattttaaagtttttctttgaccaaaaacacttttattgtctaatacaagttttacagaaaacaaataaaggatattaaaaagagctttatcagacgatgattttctttattagatcaaaacaaatataagatctaaaaataaagtcaaactctttgtcagttaaacaaaaaaaaatagtaaagaatttatattggttcatctctaccactgaaactacgtccagttcttagcaacctaccaggttttcactaacttatcaaaaattacaagtattcttcactgccacttttagctcttacaaagacaagttctaccccaagcttgacttaaacccaatattctctatcctaccaagccactattgactctaaataaatcaacaagatttgttggaagttttcccaatgactaagatatgatcgtcttacaaacgaatatatcactcaacactttagtcttttctctcaaggtttacaaggtattttgagagctttgtatctatacagaaagatatacaagaaagaatgataaatgaatgattcgagcaagttgatttgtgtcttgtatcttcaaagcttcttctatttataacattcatcttcaagtatttgttgtctcttaatgaatgaattcttccctttagttcttcatctgaagtcttgtggttgttggaacatttaatgtttgtactaattgcacgtccttttttcatgtagagtccatgtctataggttggcgtgttaggcactttagtagaaagttacttcttccgtcatagtacgtttaaacatgcaaagtgcaccttttgatgaagatgaacacttccagactgtggacttcataggactttcacagatcataggagaatgttttatgcaaaagagaatgttttctttatagattggttgtgatatttgctttgtatcattgaatcaacctttaattgtgtttggaagtaaaagggtattcgcataacatctcaatctcttgattcaattgaattaaaggaaacaaattgcaaaaacctttcaaaaagggtaaaaaaaaacgttttcaaacctcttgttttaagttttcatgtgtcattatttctaacactcctcttatcattaatggataaagaaccatatattatataaatttgacccttatataacatagactatagagaacctgagcctatttaaccaactaatagaaaagcaatgcattaaattttgaaatattctaattaactaataatggatttagcaccatctgagttggcgtcactctgattcatgacaaccatgcatgcatgctaactacttgggtagcactactaaggggcaaaagcctcgtgaaactcgcctgaagacgtgtcttgaagacatgacaaccaatatctatatttttctcctttcataaaaaactgaatttgtagcaatctgtaagacactcttgttattacaatacaaagttgtagtgcatgtaccagtaatggccaagtatctaagcaaattacatgtagcaaaagtcaaataggtttgaggaggaatgtgaaacccattattagttagttagaatttccaaaaattaatctcactactttttattgatatcatctcaaattcactcaatgaaagaaaagtaatacacaaaatatattgaattagtataaactcataaattcagagaagttagaatatatatatatatatatatatatatatatatgtatatatatatattgggttacacaaattgataagaaggcggtgcggtaaaatttggaatattctaaaaaagtgatcccatcattattaacatcatgtgagttgtatgctaaaaaatattttttactccattattttttaacaaaattatttatcttttatttttttataatatttatttaattttaataaattaataaatgaaaaagagataggtaattccctttatttcatgataatttaaaagggataaaaaaaaatttagtatgtcgtgcaagaataattccactccttgtttttttcatattttttctactctaattttgtgccaattacttatattatgggtggttggatgaaaaaaaaaagagaaagaaaaagaaatttgaatgaaaaaaaaaagtaaaataaaaaattaattttttaaattttttaaaagtctaattttctctcgcctttcttttaatctttgttccaccaaacataaaaataatatattgttatgaaaatatgtttataataattgatatttattcgatttctatatttattttatgatcaattttttctttaaattgacaatataatatttaaaaagttttattttaaatttatgttatcaattaagtgagaggcaacttccaaaatgccacaattggagaaataaaatgttaaagtgccaggccttaaaaaaattttgtcaaactaccacgttgcatttctcgcaagccaatccagcgacttctaatggctgagttggcagtccattattggccaagctaatccactaggcttgatagctaggttggtgtaatccgctaagccttatagctaactaggtgtaatccgctaagccttatagctaattaggtacagttgtgcaacgtgttgatttgaatttggtgggatgggctgcggagtatgtgaaatatttagctgtacccatcagtgaatttagtgttgatgaatctataaataccccctcagtttaacagacattgcattcgaagaatattatctagtattggtttttgaaaattgtgtgttagttgtatttgatttttacatgagtcgatatatattgtgctttttgttttgtaatttttgaaatcgaaatactttgggccaaaaaattaggtgatatattttgctatattgcatacggaatatagtcctatttagactcttttttttttttacataagtagtcattttatatttattttttttaaatttttaggtgttactttgctttttgatttttgaaacaaaaatactttggcacaacgaaataggttatatattttcctataatattttttttaaaaaaaaaatttacatgttattttgctttgtgatttttgaagccaaacgaaataagtgatatattttcctatatatcatagggaatatattcctatttacacctgttatttttacatcagtagtcatcttctattatttttgttttttattcttcggtctagaagacatattgttctgttatttttgagtttttaacagcaaaatgagtaatagtagaaatggtataatcacgattgtgtattataatgggagtagatattttggacctaatggtcaaatttttgaaggagaaagtaaaatgtttcgcatgcccccaggatgcagccaccgtgatctaatgaaaatgatttacaagaagttgagactacaacgcagacaatgtgtctctcgattgactgctagatgtgcatcgggcaacccggtgcagtgggttgttgtagatatcgtagatgatgacgatgtagcattagttactgacgcatgcatatccaatggagaaaatcctagatttatcgaactgtatgcagaattaaattgtggtggtcaatcaagcagtcaacaatgtgtgcaaccgactagttccattgacattaatagagagccacaggtgaatcccgaagacagagatgtctccctgtctccaccagtaccaacccaacaaacccaagaaatggattatggacatagggatatatccgacacaccagcaccaccaagtcaagcagcggagaatgaaatggtggcagcctatgacccatcttggcctacggatacttctgcggaagaggtggatgaaggtgttgttccagacagtgactcatcagataccgacgtagatggtgatttcgatcgtgctattccaattctttctccgggcaatgtgggaatgcaggagcagcctcccgttgtaggtatggatgaacattgtttttttttgtcaatagtgttaagtttttttgcaggtttaatgaacattgtggttaacgtcgcatcatataggagggggcaacgttccattttggtctagcattagtcattacacgaatattaattgggaatacccagatcaggagattgaggatatgcaaggagtgtgaatacctaactgacagatggggcaggagctatataaggaccaagtgtttgacagcaagtgggatgttcaattggcaataaaacaatactgtatggccgagcatcgcacaacggttgtaaaaaaaagtgatacgaaaagacttattatggtttgtgaaaatcatttggatggttgcatatggaggatgagggcatatcaaaaaaaaggtggcaccgaatgggttgtaggcatatggaacaacctacacacatgtgtcagtcagaatctttctcaagatcacaagcaacttgactcacatgtcatatgttcgttgatcttaggtatgttaaatattttaaattgaagtccaattattgcttaaataatttattaatgtattattgtttgacaaaatgcaaaaatgattagggaagatcccagtgttaaaattgggttgattcaagaaaggatagcaacaacgatgggatttcatatatcatacacgaaggcatggaaggcaaagcaaaaggcccttgttcatatttttggagattgggatgagtcttatgcgtttttgccaaggtggttgggttacatgttacatttttctcctgggtctgcatacaagctggatttgcacgaccattttattgatggtcaactagatgcaagtgctaaggtgttcaatagggtgttttggacattcaaacagtgttgcgatgctttcaattattgcaaaccagttataagcatcgacgaaacccatttgtatggcaaatataggggaacactgctcattgcaacatcagttgacggaaacaattatgtccttcctattgcatttgcgattgtttccgcggacaatatcgacaattggtcatggtttttggcactcattcgtatacatgttacgcaaaaagaagaaatttgtcttatttcagatcgacatgttggcataattgccgcagtaaacaatgtcgaactaggatggaatccaccaagggcgtaccatgtgtattgcattcggcatttggcgagtaattttaatcacagattcaacaacgtcatgttgaagaagcaattaaagaaattaggtatgtctatcagcctgcaacacaatgtttatacatgtcgttaccatatccatcgtatgtgttgttctttacatcgtgtttgtatgtgcagcttatacaacctcgcgcttagatttcgatgccggattacaaacatttaaagaagcaagccctcaaatagcatcatggattgatagaatcccaaaggagaagtggagtatagcgtatgatgaacagggaagaaggtttggtcacatgacaacgaatctttcagaatgatttaacaaggtacttaaaggagccagaagcctcccaattacgtcccttgtccggttcacatacgcgcgtttagtgtcatactttgtagcacatggtcaagaagcccatgaggagatggtgacaggtaatcatttatccaaattagcatggcaaaaatacatgaggatggttgataaatcggcaacgcactacgtcacttgttttgatgcacttaggacgagatttgaggttcaagaaacgtacaatatacgaattcattcgggcggtaaaaaatggtcagtctccttagctgaacgaaattgtcaatgtggtgagttcactgcatataggttcctgtgtagccatgttattgcagcatgtcgatccacacaccatgatcctagacaatatgttgatgatgtatacagtgctgcgtatcaatgtcaagtgtatgcactgcagtggtttcccattgggaatgaggagttcataccaccagctgtaccgccaattgttataccagatgtgtcgctgagacgtacaaaaggaagaccaaacagtacacacatacgaaatgaaatggactctagggaaggctcgacgactcgaacaacatgcaactactgtaaggttgtcggccacaataggcgtaattgcccatcatgcaaccagaaccaataatgtacttggtggctatactaatgttaatcatgctaaatatttaataaacaataattatcgaatattagtagagtccaaatgtcttgcataatacatcaaaatcataaaagttaatacaatcatccatataacagtctgttaccatagaattaaagagcatcgtactgtcactaatagggaaaaaaaattatttagtcatcttgttggtggccctcatggaatcctccacagcggcttatgttatgttcatacggtgacagattgcatcgaaagcgcgtttccctaaccggattccgcgtaatgatgtgctgaaggtcataagaaccatcgtccacgttgtcttcatgtccctcatccattgccgcaatgatttcatctgtagaatactgtccgaaactcagagaatatgtcacatgagacgaccgttcaataggagtcccaaaaaccatatcctgttccaatgttggagtcggagcagcgggcctataacagtcttcatatgcgtctgatctgggtgtgtaatgcaaaccagatgaagtcggccctgataaacgtggcccagctgtactggggccagcagaatgcatggggtatgatgcatgtgggacaccagcatgcggcatcgacggtccacctccccaaggggggtactgtgatccaggaatagactgagggggccaccaatattgttgtgagcggcccgaagggtacccaggtgcaaagaacatcctaggaggacgtggaggaataggtggtacaaccactggggtatctgcaactgatggagtcgagtggtgaaggtgtaacccctcgtgacgcgcacgtcgattacgccgaaccactggtggcggggcctcagtctgacgtcgtattggtggcggtgcagcatctccaggatctattaatctatctatatcgtcgcatgcagccagcattcgaaccgcctcctcgtacatctgagtcatgtcaaatgccccatgtgcctcaggtgaaagcatgtggacaacagtctctgctcgatcggtctgcatatgaacaattattagtgaacattacacgtaaactaatatgcataaacaataataactaacatgcataccacatgtgccttcaaagcggctttgtgggtcatccaacgacgggtaactgagtagtaccattgcatgtattcactgttgacagataggtacccgtctctccgcataggttgcacgtcctgcaacacaagggcgtctctattttcccattgttgaataaagaaaacatgacgctgacaccaatccatgtctgtcttgccggtaatagtaatcgtcagcagctcactacaattaataggagcctctgggattggctggtcgaacccaaactgacgcataactctatccggctgctggtatacgacaatctcataacatataagaagacatacagccaaacatctcctcgccatctgaatatccagtggatggactgcgtctacaacctcatatggcctccaacgtatgtctctccttcgcatgacatcaatatgatggcgatatctgtatatacagtttgtcgcgtatggtatacattaaatctgcaaaggaaaacaacaacaatcataagcaatatatactgcaaatacaaaaaaaatgaggaatactaataatcaaataataaaaaacctgtggccatatatctcgtgctgtacgacatgatggtcttccaccgtaggaaggctaggagagatggtcgggaatcgcgtccaagcccacaactgtaacaacaaagcacatccactcatctcacaacgtgaggcacgtgtggccttacacaactccctatataatcctgcaagaactgcagagccccaactgaatgtccctgtgcgctggaaatcatccaaatataacaaataacgagctggcacgaagctcgaagaggtgtcaacaaacaacatcccgcctaatatgcgtaatatcaaagcacgagtgtatctacgacgtcctatttcagtgcctgagtggacctcataaacatcaaactgctcacgcaaaaaatgaaggtttaacaagccgccctgcaaatcacgatcagcagccggctcaacccctaacatgtcaccaatgatggcccgaaagttatgtcggccgtgacaaccacaaacaacatgaccatcggtcggcagacccaacagatgatgtacatcctccagggtgattgtgacctcacccatcgtcatatgaaacgtacgtgtctctggacgccatcgttcaacaagcgcggagacaaggtgatggtcgatctaaaaacatacattacacaacaattacgtatacatcacaatacaatcaatacatctaataggaaattaacaaacactgaatatacgaacctcgtgattgcgcagacgcgcaacgtgataaaagccagcttctataagccacgggtgtatatcctcaggtatagccatatggttgtgtgtcgcggcatgtcgaacattaagtatacgatcccgcatggttggatcagcctgcgaattccacacatacgtggatatatgtttctcctgtattgtaaggagactccgtatggatggacctaggtcaatgatgctcaacgcatccgatggtgtcggtggaacatgttgctcgtcatccattactgtatataaatttgttcatgcaaaattataaaatatacgttcattaacaagcaaattaatatcctagtgtaacagcattctcaaccttaattgtcatttttaattgactatacctaatttcgtgtatcctgttactaagtaagtataaactaatcttaaatattctcaaccttaatgttgttgtcaatgttttgtttttgttgtcaaattaaacatgcagttaaacactaatgtgaattttcatatacgcttacatagtcaaaggcaataattgaaacctaatcaaacaacataacgtacaaagggttcgaattacaaacacaaacacaataagttcaacattacaaagcaacacatcgtaacctactaagaacaacaactgaaacatcaaaatgacgcaactattcataatttggtatatcttgtgtagcggacatgtcatcttctagtagttcgattgctggtttgtgaaaagtagctaaaatttctattggacagaaacgcttccaataattagcttctgctaacagcttaagtagatcttcatcgtttttcaattgttttatttcgtagttaagcaaggtatttgaatactttgcatcagctggttgtcggaagaacaagtgtctgacttcgtgtgattcaacaattccgtaagggggaactcctggcggaacaaattgctttattatatgctttagtgtttctatattgcatccggaaggaatttcaaatcttttaggatttgttccagtaaacgagtaacccaaaaaattgcctcgtcgtggtatgttccacttgccgttgtaatacaacagggcatcatgagtaggagtcatggtggactgaagtaggttcagtacaccgtagggtgttctgcttatcatgcataacaattctataggaccaacagtcgggagtttttcatggcacaccaacataatgcaaacatcatcatcattgttcacttgcagcgcatgaaaaaatattctgttaactgtattgattgccggttgacgatagtaaatttcatccacaaactggtcatctgtgagcagaagggtgttgtgcattctactcttcagtgactgaaaggaacattcatcgggaactcgcattggtataggagtatcacatacgaaagaaacaccgatttcattgtgtgttattgatccattcggaaaaataaatgctaacttcgaattaccaatgttttgagaccttgtttcacccaagaaggccatggaattgcgattgtgggatgattaaacccgggtgtcgtctggtgtatatatcagggtgttaagccccgcctacgtcgggcttaaccacttgcgcctgcatggggcgtgactaattaggaatcagaacaaaacttcatagtttttcggatttggtttttgattatccccggaaaatgtatccaagactctgaagaaaaaaaaaggatgcaactgcaccaaagaaattctgtatggaaactaaatttcataacatgtttaaaaattacatagccaaataaaaaaaatggaaactaaatcaaaaactacataaataaaaatatatttcaaatcaaatataaattaccaattcatacaaaatataaacaaaaaacaaaaaataatttagcctcatgttttaaatgttcccaataaatactatttaacacacaactacataaataatatatattttttcaaattaacataattaaatgaactacataaataatatttaacaaatattctcaaacctaatattttaaacctaatattttaacaagccaaaactacataaataaaaaatataataaagattaaaaatataaattaccaatttgtaataaaatatacacaaaaacaaagactaacctgaagagatcaatgctgaacaaatccaaaataagtaaaaaaaaaacttacaaatacacacaaatataaattatcaatttataaaaatttacacaaaacaaaataaattaaaaacatagacaaatataaattaccaatttataaaattaaaaactaacctaaaagaagaggaaaatgctgaacaaatcgaaaacaagtacaaaataaataaattaaaaatatacacacaaaaacaattcaaaacatgtatttttaataaattaacaatttattacaaaattaaaatacaaactatcaaattatatttatgataaaattttaatatcaaataaaaaatcaaaaactacttaaatcaaaaatatatttcaaatcaaatataaattaccaattcatacaaaatataaataaaaaacgaaaaaaattagcctcatgttttaaatgtgtcaaataaatattatttaacacacaacaactacatatataatatatatttttttaaattaaaatacaaattacttaattagaacaaatataaacataaaaattaaaaaaactaacaatcaacataaaaacataaaaattacttaattgtattcatcaactattacatataattaattttaataaatttctatatttcaaattatatttatcaactatattatacacttaatttcaataaggtttctataaattaaacctacacacatatattaaatgaattattttaacaaaaaaaaactcttaatatttcatgtattctctaactaagttattataaactaatcttaaaccaatttaaataatatttgacaacccaaaactacataaataaaaaatataataaacattaaatatacaaattaccaatttgtaacaaaattaacacaaaaacaaaaactaacatgaaagaagaggctaatgctcaacaaatcgaaaacaactacaaaaaaaatatacacaaatcaaaataaattaaaaacatacacaaatataaattaccagtttataaaaatatacacaaaacaaaataaataaaaaacatacacaaatataaattatcaattttttcttaatcactcaatcaattactcaattttatatctcttatcactttatcaatgtgatagcgatcatttacgcgctttaaacttaaactctattcaatatgcagattaagaatgtaagcatgaaagtatacctatgcactaaaaccatgctagtattgaaatgtcggtcctccaaatatttataatctaaatttaaatatcacaaaatcattaaaatttcattcttaatttcatttgttaacgataaaatttaacggtaattaattttccctcttttcaggtgtccatcattacgttgttattattttagtttcttgtaaacttatgtacaacttcacttattattacatatacattatgaaagaagtaaattaacgattttctttttatcctatctatttcataactaaattttttatacccttatttaagtgactatactaaatttgtttcgataacccttatctaatctgaccaaattttttatatcaaaaatatttgaatcatatctattatgtttatcatttttgcatataaaaaaatcttcattttttcaaatatttgaagactatgtattgttatttaaaagttggtttgataaaagaaaaaaaaatcaaatataattaattaattcttgtctttaatttatttgaagacaaaaattaaacgaaaactttttttatacatttaaaaatttaaattttgtgttactgtcatttactttttctattcaaattttatattttttccttcttttgtatttatttttcttccaatcaaacatacatatcaactttttttaaaataacaataaatcactctaatatttcatatattttaatcaaacaactattattaataaaaattaaattttctagaacctaatgcattaaatctcctacataaacaacatttaacaactaaaactacataaacaaaataataaaagcaaaaaaaacataagcagagaaagaaaaaaaaattattttaactaaataactattaattaatattacaaatattctacaacctaatgcattaaatctctacataaataatatttagcaagtaaaactacataaaataagcaaaaaaaaaacataagcagaacaaaaaaaaaaaagctcactggataggagacagcgggagccacgggagaagagaaaatttgagagagcggagtgtgtgagggggacagggaacacctcctttaaatagtggtcccaaaatcagccctatttcgctaccagccacagctaatatggtctgtaacccgctctccgacatagcgacatagcagttgcaggtcctggcttctgacgcagcggaattcgccctctgacatagcggattagcctatttcgcatccagcaccagcgaggtatacccatgtcaggagcttaccatgcaacgaatccgagcacaccacatcagcgcgtaatccgcttttgctagtagcggtgtatgctgcatggcatttcgtctattcttttttcacgcctgacacctttgcctttttttttttttttttttgtcaaccgtggtattttgaccaaagtttcattaagtgatatcgttaaatatttaataatatgttttcttaatgattataaagtcatcaatatttattttaaaatcaaattatttttttactattaataataactaatatcaattaaagtaaaaaataaatgtgtcttttcattttctatctaaaaacctcaccctctctgtctcgccagttcttcaatggagtgggactcgctgggggttccctttcctccggttcatgagacccgccgagacttccgagatcagcgagcacgccggccggaaagcggcgccgccggtccccttgttcctcacaatctcggtggtggcagtgcaagccaaggtggttctgcaatccacccctccgtaccctgccgaaccggccaattcgagaaccgaatcaggagcccgttgttctgatgagataatttatgtgtttaaaaccaaaaaaacgagagaaaaatttgaggaaataaacgtaaacattattagaagtcacaatcagaacatttaaatttgattgtaatataaatatgagatattttttgagttattacaaatcaattcgcgctataaatatttaattaatatattatcatttaattgattataaagatctaaaataaaattttttaaatatcaaaagtcgaatatatatctaaaataaaaatatatttaaattattattattcatatattttttctatcagctttttcttgatattcaaaacattccattaactatgtttgtcacaatttttatctgtagagttttcaaggctaaaatatattttgaatttctaacaaacacatatttttttaatttatcaaataattataataaaatttattaatttatcataaatgtatcatatagttaaattaatttttaattaataataataacttttttgttacactggataatgttccgtaaatttgatcttggcaatgtctatgagcaatggcccgcaggctcagtcccatcatcatcatataaactgaaacaaccattggcgtaatgtgaactagtcctcttcctttctgattttatatatatcatcccaatatatagtaatatttatgtggtttggagtaatttttaagattatggcacaaactgaaagctaccataacacctagttaccccttactttattaatgttaatcttccttatctttattttattttttcttcaatgccccactcctcttgtttctatgcaaaacctgcttatgtttctctgtactctcactgcacgttctgtttttgtctgcagtgtcactgtccctgtcttcttcagccacaccaagagtccctctcttgcacaccaatctttgtttgagaccctttctctctctctctctctctctctctctctctgtctttctaaccagcattggagccttgaaagcatggaactttccttaacctgttccataacttaaaacttctagaatgatgcattaattaaagcggttgcaagcaaacgtcaactaatccatttctcattttttttttttttttttaccctccaacttctcctttttttttctttcttttgtttttgatatatatatatatatatatatatttactattcttagtagaagaggtgcttaaactttgaggtttgaaaaatttgtttgtgtttttattgaaaatgtcaagtctacagatgtgccatgtggtggatttaaagcaagggagtctcagtcaccaccaccgttcagtgagtggcagtgacatgagcatgtgcttttctgatgctgagaatggttcaagctattcccatttctattcaacaaatggtgacccttacgatgattacacctttggttgtgtttctgatcctgaggatggtggtgatgctgattcaaggagggcttcttctgtcactgattctgtggaggtggaaattgaaagtggtgctcctgaaattaaagtgcatttggccaaagtggagagggattgcaggatttgtcatcttggtttggagagtgatgatagtcaagaagagtccggagttcccattaaattggggtgttcttgtaaggatgatttgggtgctgctcacaagaactgtgctgaggcctggttcaagattaaggggaataggtgagtttgttatgctttaatttaaagcttatcttttcttaggttgtgttatgttttcaattggaacttggaagtctcaaaatctgctgctgaaaaagtagaattggaaaagcctcttgtttggttttcaattaggccaattgtaaactgagtcttgcctcaattttgccttgaaactcaatttgaaatggaagtaaaagaactgttattgcaaacgcatttgtgaaataaagttcattcaaacttaagtttacaatttttaatccaaacatgctcttacttggattgtgaactcggtttttattttaactttcacaattttagaaaaatagaaaatacaaaccctcctttttttgatttgttgcattgggaatttgagcttattaactagtcatgtcatgccatgtcactgcttgcagaaaattttacaatttactgacatcttgtatttagtggaagggtatggatatgatactcaaaactgtagtgtagaaaaattctgaagtgtaagtgaagtatttagttggcatttaacttgtgaacggtttaattaaattttgagtataaggaacaaaacttttacggcagaaaattccatcgtttcttcaagagaggggaatgttatagaagattacattatttaaagaagacttaaagagaaaggcataaagcattagtcagtcttactgattagctgagttgtgcaagcaaagtgggattccttgttgctttgtcccttttctgaaattaaggaattttcatattatttctttttcattatctttatctcaatcaaagtggagatttgacaccttcgcccctttgttcatgtatttgggatttatttttgttgccttggtggatgctttagcttgatgatgtgtcaccaatgatattttaacccaaaaagttaaggatttgtggaaatttgtttatttatgatgtatgatgatatcaaacttttagtatgcttagttgttttactcaccacaagatatatcctagtcaaagaactttaaggtaaattattgtcacactgcatgtaaaggttcagcatgtcacttgcagatagtagaacagttaaaacctgtactcattgtaactgtgctaatccctgattttaattgcaatacataaattctaattcaatataatgtataatttttttcccttgcttaatgcatggtagtgaacctattttattgatgaattatctcttctccatgtttgggaccatctatggaggcaactatggttaacattataacatatctagttgctgatgaagtggagggaggaatgtgaggtggtgaactagtggggcaatggtcacccctaatttttgtgatgttttttgaaattactataaaaattattttgtggtcccctatattaaaaatattggtcttatctatataatttatttattttctcatattatttttgtactcaatacagttatgtagttattttatttataaaaggataacagttatatattaatttctggcatatgtctgtaaccaaaaaaaaaaatatcttgcatatattaatgcacataaaagtttaaaatttctttactaagccatgctatttgatcatagcctcccttaagccaaagttatggttctgccctgcaagcgcatgattagtggctttattaagtgaaacagaatatgaatatgttctctgttctttctttgacatatcgattgatgcttttgttttattgatagaaatatcttgaaataatctttttcttaatgggtttagaagaagctgcatggtttaccttaccacgtgattttgtcatagtcccaccaaagacaagtgtagatttgtagaaggtatcaagtaggaatcagaatctgtctggtatggcatcttagtagaaacacatacgttaactgacacgcactttcattcaatttgaaaaaagttccttggttgcaatagtgagggaataattgctccacccatcaactacgtccttattctgtgtatgagcttctaaattcttaaggatttggttaatgtactaagtttgtggttgttgacaatgtgaccttttcttttttatctagtttctatcatgcattgccaatactatgtgagttctcgtttgctagtttattttgatatttcagtttaggaggggataataatgcccctgatccttttacatagcatgtactaaatggtaccaacaatttttcacctgtgctctctttctcgctttcctgtttcccttaaagcaataccttgatgggatttatcatatctactttcttctagttttgtaacctcacaattataactgtagctatttatatgaacataaataggttaaatatgtttttagtacatgtaatagaataaagggaataactaagaagagacaatttatttttgagaaactaaaagtgaatattactttatttgtgaggataaatttattttttgtcactgagatattggtgcaaagtatctactgactttggcaatgactaatttctcttaaaaacatgactttgttgatgactaaaattgtatttagcccttaattatttttctaatttttttttctgtttgttaaacttcaggacatgtgaaatatgtcattctgttgcacggaatgtttgtggggcaaatgaggagactacacagactttgagtgacagcaacaatgctaataatgcagcatccacaatctcaacatcaacagaacctcgaagattttggcgaggccatcgcttcctgaattttctgcttgcttgtatagtttttgcatttgtcatatcgtggctttttcatttcaatatgccctcctcgtaatttttctaaagcatagctttttttttttttttttacttatattttaaagaaatatgaaatctaatttaatgggggagggggtgaagagaaagaggaagaaaaatagaaaggagaaaccacaatctaaaatccatagagaattgattcttagagagaactactgttctcattttaaggccttactggtgctatgtaagtaggcatttatatcatccttgcctctatgcaagtcaatagtttgtgctttagtcatttatgttgtgcagtcttcctataatattgggtctttctttatagtgctttcttattcagacaaaggtatatagcagagcttgtctataatgtttagaaaaaaaaatcccccctattaccctattttgcaaatcaatgtgatttttcataaatattaaatgtatattatggatatgattgttttaaagtgaacaattcattttagttggtacttggtaaagtaatcgattaacattaacaatgtattaaaaggaaggttttttttttttttcccacatgtcaagatttccgtcctttttcaacaatttcaagccactaatttatcttttagttaaactgtccatatcatatagtgattaacaattattttttcacaaagtttctactattttaaatctgtcgtggatatattatgtttttttttttttctaatctcaaataattataatatctatttatttgttttattagtaatatctatttatctactttattaacaagggaaagggattagacacaaatgacttacgtgttgaagttaatattgaattgttcgaatattatttgatactgattcttgaaagaaataattttgtcaaattttatttaccttttaattgaactcttaattcatttttttataatggggagggttaaaaaaaaaaacaaaaaaaaggtaattggtgtcacatgtcaagattctatgcaattatcccctccattttcaacaacacatgcaagtcattaattgatcttttagttgaacagttagtattgtactgtgattaacattttttttttctcaaaaaagcttcttttactttgagtctgttgtatgttatttatttttctaataatatgattttaatattttttttaaaaagactatactatcattaaaaaaataatatttaatatatatatatatatatatatatatttgtcatcaatctattaactctattttaagggaagggaaggttttgggagaacaaacggtcatctttttaataattttttccatctcaaaccttctctctctaatttcattttttttgttttcaatgttttattatttttattttaaaatcttatgaaattatttttagttaaaaattgtataaatcatttaaatagttgcataagtaaatatttttttattaatatttaaattatcagttataatttttacaccgaaaattaatttaaatataattaatttaaaattttaaaattttgactctatttttaataattatatatacggaaattttgttcattattatttgtattataatcttataatattttacaaaaatgtataaaatcaattttaatattaatcaatttattttataagaaaataattttattaaaataaaaaccagtagcacaagatgtgccaagcttacaagtcaaagcaaacaaaataaataaagcataaacaagatggatacagcttttgcccaaccaccaaacgcaccaaaactcacgtcacccagaccaacaacataataatcattagctacatacaccaccaacaaaattaacataaggaaacaatattaacacacaaaaaccgtagtgatagatcccataacatttcaattaatacaaatacatgctgtaggattcaacacccattcacataatgaatacgtgagacccccctttgccttattctactgccatgaacggaatttaatggaatcaataaggcattccttttttgtgtttgttgatgtaagtatccaagaattatggctcaactctattgaccatattatcacaaatcataccgttatatgttcttaccaaaatttggaagagccacgcataaggatggatgtggtccatgtggattctagattcttcaacgtcggacggtgagtcgactttgctaaaatggagacctgcaaaacaaaggaaaggattccgacgctcaagtaagtacatcaattgtatagagagaaaaacatatatatgagtatatgaatgctcaagtatatgtgaatgagtatgagagtgaatgtgttcaggtgtgtggaaaggttagatgaaacttgtatttatagtgtgaagcgtgggcctttgacctttgtagataattaacctgtagataagactagtagataattacaggttatagataatttgtaccttgcaggtaatctgtagcttgtagataagtaggtgcctattatttgaaaagtagttgcaacattatcagtaacatttgaataatatgtcttagagataacctgttgggcgtaacagcccagctgttgaggggagtgcgtccgcggcccccgtcctctgagtcagcttgcaggcaaaagaggttgtaaaagcgtctggtatcgatggagattgtctgatgtcaaagttagtagccttgacaagtaggagagtcgtgagcttatggagcccctgagtgtggacaagtgttgttcggtgtcgataatgataactccgacaaatatgagaaatgtaagtgtattgagcttttcaacccccccagccttgacaagtgttgtccgagctatcattgttgaattgtctagggatgacatgttttgttctgcaggcgagatcggacatgttaggaaagtgaagtgtccagcttggacatttttgcccttatctaattgttggagaatgtattaaaagcaagcgttacgcttgtctcttttcacaggcgttgcagcatacgtgcagtactcatgcatacgtgtcactcatggagtgcgcacgtactggagacgtgcggtaatgagtgagtggagtttgattgtggcacagattcttaggaaatcatttcaaatcacgccagtaactgaaaggttgcacctccatttcaatggagtggatgtgtgacatttctttgtcaccttcatcatttacattcttgatcttctcttctccagaatcttttttgcccttcctcaatcttcttgttttcccttttctccattcaaggtatacctttttcttctctgaaaatgtttgtgtctcccatttttgactttgctttgggtcttggtggtatcaatttagggggctcaatcgagcaacccctaatgcacgaagtcatttctgttgatgattccttagaggaagagacccaccatggaacttctaacggtaagtcctcctcttcagggaggaaggttgactcacgtcgtgctggcgagggtacctctcaccttcgtcagagggtgaggccttctgtttcccctcaggccaaggaacctatgcctcttaccaccatccttccttctactgctttgggagaagtaagaagaagtggtagtggaaacgcccgggcttctccccgcatgcaacacagccataatgttgggtggtcgtcgtccacacttgttgtgtctggctatgagtggatgatggacgaagttctcaaatataagtcttctcttacgtcgacgacatatgtgaaccccatgtgtcatcaactaaggttgacgacccttgaggactcttgtaaggtgattgttaaggcttgcgggagtgatgaccttcctttctcgagggtggtgccaagtgttcgccctttttcttcatgtatcggtgcctttttgaggtactgggtttgcttcttcccttgtctcccttttagtgtgctctttgttgcgaaaaccgcacactacggcaagtgcaccgatcgtttcaagtaataaaataggtaagtgagtatcgttctccacaaggataggggtgaattcacagtaatattacgccaatgtgattgaaagtaaaacagaaaatgttgaagaaagttgttgttgagtaaaaacaaaaattaaataagcaataaattaaatcaagaagttaccaatggaagagcaattgtggtcaggcacaatcccctttgattcctacctccttcactagactggtttattagtttaatttacacaaatgataaatctctcctaatctcgtaaatcctaaattattagcgacttatccctttaattcgatcgagaatcctaatcccttagcaatcctgtcaaactaagcatttagagaatatatcataagggtttcttgttatgattgttcagaaaataagtcttttctagattagttaatccctaatcccttagtgaattaaccctttaacctgaatcgaaaacctaattccttactgaaatctatcagtttaagcatttaaaagaccatatcataatttctgcagccacacatccctatccctaggtgatgaacaactgttactctaaacaggttagaaattagaaccccaacgtccccattgcgaatcctaactctagatacttaattgaagtgatcaattccaactaagaagggaaagtaagaatagaatataataaaacaatcaaaacattattgttcaataccagtcaagttgcagaggagttcacatcagttcatggccttcccacaatacaagatttagcctgccataggcctcaagaacatcaaagctgtagaataatacatgactgtgttgaaaccctagccttgattcttgatttccagggatttagaatggtgtttagagagtttctctggctaaccccctgttttccaaggtattcaaaagtatctagacttagttcagaggctttgtatttatagaatcatttaattacagtaataaagcctattcctgtgctcaatttcgaaacagataaactaattaaggaaacataatccatgtggcgcgatccacgtggagtcccacgcggttattcgaattgatggcgctgactgcgtgggaccccacgctaaccgcgtggagtcttcgagcttcaatggtctggatgctgatcttctcgcgctggtagcgtgaaattggcacgatccgcgcggcttcttcgagggaaaaagcttgaactcgagtctttggcgctgatggcgcggctgtagcgctgatagcgtggtggttgcgaccttgtcatgctagtcgcgtgggcttccacgttgatcgcgtgggatcttcgaaactgaggcttctaattcaccttatggcgcgatccgcgcgggaccttgaactggattttctttcttccttttgccttgaacttcctcttttttaacctgaaattgctcaaatggtaatgaattgaatttaaaacaaataaaatgataaactaactattcttattctatttttctaaatatttaactaaattatatcctaaaactagcctaaaactaagatgtgtttgcaacacatcactcttcctttagtatttgaacgtagcgccctcctaacttcatcccaatagttgggcagtggtgagagcgttctagattctttgtcccttcttcaacatttgaccaagtgtatcgattttcttattcttcttttagatgaaaataacgggtaagattgactgggtctccttgaacaatgttttccaagaagttgtttgagtttgactcaaatgactttgtttcaaggaccatttctttaaggtccgggatagtggtgtcgtggtagatgggctaccattgatgttcaaccaggatggggagccccgcttcccattctattggcagtgcgatcttaccaggttcaagtcctttgataaaaacttgttgaccttggtggagagggtggataaggcaatcctagagcagttgctggtttctttggatgtgcgagccatcttgttcttgtcgttggcggacgatccccttgctgctttagatggtaaacccttttgtcctgtcttccttgtctccttctatatttatttatttatttagacttgacttgacacttgtcattttttgtgtgctttgcaggtatagtgggtgacttcccatggaggccattggtgaagtctgttgggcctgaaggtgagactatgccacccacctctatcaatcctctggatggaggcaagagtcgacccactactggtgtcggctttgctgatgttgttgtcgcttcccccagcatcccctcctctactttagctaagaggaagcgggatgatgatgttgggacgtcgggttgcaagaagtcgagggcccctcatggccttcgtgcaatgagggaggtcgctgaacttcttcccaatttacttgtgtcgcgattagcagtacgagctcttgcttttgctccagtggtgacacctgctgttgttcctgcttctcctgcccctcctcctgcttgtatcgctcctgctccggccactgatactccagctcgcaaggatcttgaagaggaattgtccctttacaaaagaaggtggggagcagcacgaaaaatcgcttcctcaaggccgttaggcaggccgatttatgtgctaaagaccttaacttaggtctttctgaccctttcaaggatatgaaggaaggtgctctgctcgacgaagaagagcttgcttcttccgaggaaggtgctaatgaagatcagggtgatgggccaatgtctaggctacccttttccctttgtatttttgctttatttgactttgggtcttggaggccttgtaattttgataatcattctcctttaatgcaaatgttcttctttcatctttattcttctctttttgttctttgtcttgtatgatgtttgtttgtacaacacttcgtggtgatcatgataggctgctttgacatggacgatgtccttgcaacataggaaacgagacttggttgaaggtctttactgaccagtctggtggtgtttcaatttgcctcctgtttgagggtgagtggctgatcctttggccctatttgtctaggttccaacggattgcacataccaagagtgtgtcttgggttttgttgaccaagggtggaccttgggtttgttgagccttgtaccagggtagttgttcatcttgggttttctcgaggcttgccaaggatagaccttgggtttatgaacctttagagagcgacaaggaactggtcctagtttttatcatttactgcaaagttgtactcctccaagaataaagtttagaaatagtaaagcgtatcaagggtaaagctagcataccttgagttttcgcatggggaaacatagcaaagagaaggctcaccaagggtggaccttgggttcgtcgagccttggatcagggagtcatctatcttgtgttttgtcgaggcttaccaagggtgaaccttgggtttgacgagccttcagagagcgtgtttctccaagggttaaccttgggttttgcgaaccattgaagatcgaccaggggatttccctggattttgctgaaggtccactaagggtgctaccgaaggatggccttggattttaagaacctttggaaattaccaggagctagtcctggatttttgtctggtttcaccgggggtgctaccaagggctgaccttggattttaagaacctttggaaattactaggagccagtcctagattttgttggaggttcactgagggtgctaccaaggactggccctagattttaagaacctttggagattaccaggagttggccctggatttttttttttttgggttcaccgagggtgctaccaaagctggccctagatttttgtctgggtccaccgagggctgaccctggattttaagaacatttggagattactaggagctagtcctgggttttgttggagattcactgagagtgctactgaaggctggccctggatttttaagaacctttaaagattaccaggagctagtcctggatttttgctgaaggtccactgagggtgctaccgagggctggccttagattttaagaacctttggagattaccatgagctggtcttgaattttgtcgaggttcaccaagggtggaccttggattttaagaaccctttaaggttaccaggacgtgttcatccttgatgttagtaggttcttgtaaacttgtatccctgcaagacaaagtatatgaatagtagagcatgataaggaggaacctcacatacctttgattttcgtgaaggcgagacttggcaacgtagaggctcaccaaaggcggaccttgggtttgacgagcctttggagatgcaaccaaagacgtgtgtccgtcctgggttttttctaggctcaccaaggatggaccttaggtttaatgagccttttgaagatgtgaccaggaaagtgttcgtcctgggttttgctgaggttcaacaagggaggaccttgagtttttcaaacctttaagatcaagttcaccaagggatgacctttggtttagtgagccttcttactgcatggagtttgttgaattcttctttgattttggccatgttctcaatttcatcttttatttctagttcgaccttcatgttctcttcgttttgctgcttttgaaacattttaatctccttgtcgatggttccctgacttcaacaggaatcatggcatctgtgtcatatgtgagttgaaaaagggtttcatgtgtagttgtctgaggtgaacaattataagcccagagtatactgaggagttcttccttctagagacctttaaacttgtcaagtctagtgcgtagggcttggaggatgactctgtttgctgcctccacctggccattggtttgggcgtgttcgacagaagtgacgaggttcttgacacctagccttatgaggaaatctttgtaggtatgtgctttgaattgcgtgccattgttagtgacaatggcaaagggttatcgtgcctgcatacaagatgtttccaagtgaagttttccacctcactggcagttatctaacgtaagggcccgattgaccgtcaggagagtgtagcgctcacacctaggttcttttgggagaggttggcgcttgtcggacttgtgttttttgtccaacctatgtgggtcaatcttggttgctccttcttatttatctcacttctgtccggcttgtctgaccttatttcggaacttgcacatttcttccatctgaatatagcccttggctcttttgtgtagttcatccatgctagaaggtggtttcttgcataaactgccgaagaacttgcctggatgcaaggctaacatcatagaatgtagcgcaacttcgagattgaggttccaaatttggacggtccatgaatctccgaagagacacatcatatgcttgtcgcagactggctagtgcagtagagatagtctatgagactggctggtcgcatactgtgtgtatgcactgaatctttcgacaagggtgtcgaaactatcgacagatctcagaggaagtccactgtacctgtcaaggcaactcccttgaaaggtgtagggactacctgacacaatattgtatcgttattagtgtatagattagcctgggtgaggaatgcatctaggtgctcatcaggatcattggtgtcgtcataccgctctaggtgaagagattttcaacctgagggtagatcgacctccatgatacgatcgacaaagggatgtcgacgagttgtctgccctcttggatggtatatttgtgataaactgggatcgtcctgagggttgacagtgtgtcgggggtgtgattccccttgagtatgctcgttccctgtgagaggtgagtgctcgttaccttgggggcttctcactctagcttccaactgattgtgatcagccttcagcgttcgaagctcttcttcatagcatcattccatctccgaaatgcggctttagagttgttgaatagtttctgcatttgtcatggttgtctagggaggcttggaagtgtcaatgggagtatgacgcctaaggctagagtgcctactgaccattggtggattgacgaagaatgtgatttggtagatagatggagaaagcaaagccgtatggtaagttttatcgcgaccccacggtgggcgccaaatgtttttaccaaaatctggaagatccactcataaggatggacgtggtccaggtgggttccaaactcctaaacgtcggacgatggtcaactttgctaagaagggggacctgcaaaataaaggaaaggattctgatgctcaagtagtacatcaattgtatagagagaaaagcatatatctgattatattaatgctcaagtatacgtgaatgcgtatgagagtgaatgtgttcaggtgtgttaaccgtgaatgaggtgtgtggaaaggttagatggaacctgtatttatagtgtggaacgtgggccttgcgcctttatagataattaacctgtagataaggctagtagataattgtaggttatagataattagattgtagataatacgtagcttgtggataaataggtacctattatttgaaaagtagttgcaacattatcagtaacatttgaataatatgtgttagagataacctattgggcgcaacagtttgactgctgaggagagtgcatccgggctcctgtagcaaggctgacgtggagggttgacatgtgtatggaaggtcccacataagttgtcacgtgtattttttatattctagacagtacaccatccaatactttttgttatcgacatcacaacgatggaaattttggaacaaatgatgcataattataatatgtatataacaactaataacaatcatattaaagttagaagaagaaatgaaattcatccttaatatctcgattgaatcacaaacacaaaatgaaaaagatattactctctatctagtggttggggttttcacataatgttgtgtatggtaaaattgtaagaattaatgtctcatatgagaaacatgtgacttatgtagggactaataaataaataattaataattaaggactaaattgtaattgggttaatttctagagataattactattagatgagagtggtggttataaaggggttaatatccactaatgtgaaataaggtctcattcttgatagaaaagtgttctctcaaaacccccagtcgttacgaacgtagagagacagaaaaaatattcaaagaagcaaaatcttatttttctcctctttcaaggaatctagcgcaccagagagaagtctcactatggagaaatgtacatattgtgtatctattatttatgagaattatatatttcaaaatcctactaatttcttataattattaatctcggaagcccttaatatttatatgtgatattaaagcatgtgttatgaaatttatgattctccaataatgatttattttctcccaattatgcatgaagcctaattatgaagtttaggaattttttcccgctgcaagtataatattgtatcatgtatatggataaagaattgatttgaatggccaaagttttatagtgaatcggaatattattatgttgtttttgtggcatgttttggtggcaaatactactagaaagcttctctattttgttttgttttgctgctgcataatgtttggtgatgtttagtgatgtttggtgtagtggttgactgattgtacattttttttggtgtttataattacgatgttgtgaatatgagaaaaaaaaagttttaagaagtagtaagagtttggtgtgaggtgtgagtgttctgcgcgcactgcatcaacaatagtttctcaaacaacgtcgtaaaaggtaaaggtttggtcaaggactgttaactcttgtggctggtgttgggcctttttgtttaacagcttgaattgcgttttctttttattttgggatcggtttgtttcataagagaatgaagaatgaatagcacttgccttgccatagatattattattgtaataacatgaaatatggcaattaatgttttgttttggagaaagatcatgtacgtgaaggtgattggatttttttattggttataatgtgaatgaatgaatattattttatggcctggaataatgaaattgataagaatgctataaattattagtagtagtgaatatgtgtaggtcatgtatttgtttggaattaagtgtataatggttttattattcactaaagtggtcaaatctataaggttatttaatttcaaattaatgatatttcaattattcatagaataatgaatgctaaattatatgattattggtttatgggtaattgaaattcattgttataagacatttatgtatagtccaaaggttgattagtttttcttataattaatgaatataattgtagataatttgtatgtaccattagttttatttatatacccaaaggtagcaagtactagtaattggtgcatatttaattgtcaaataatgttaagagttttattagcatcatcatattgtatgttgcgtgttggtgtataattcaaaggagagcatcaatatacattgattgttatttgaatgaattatatgtatgacatgtgctttatgtcttaaagcgcttatgtgaattttattatgcaatacctgttcccaattcactgaattctcgtgtatcatttgtgtcaatttttaataggcttaacttctcttattgaaataagcaagtccaatttcatcttggtgttttggatcttgatcttgctatatttgaagagaagtctgctactattactgatgctagtagcaatgaagagaaaattcattataaagcttgggaaagatctaacaaactcagactaatcttcatgggagtgactattgcaaacaaaattaagatagctctccctaagaccaatagtgcttcagagtttatgggattagtgggagagcgctctcaaatagttgataagtctcttgttggacattaatgagtacactgatcaccatgaaatttaatggttcatgttgtacgcatgagcatgtcattgagacaaacattgcaacaagacttaagacctcgggaatggttgtgaatgtgaagttccttgttcagtttattttgaactcattatcgtctgagtatgacccgtttcaaatgaactataataccacgaaagataaatggaatgtgcatgaattgcacagtatattagtttaagaagaaacgaggcttaagaatcaaggaagtcactcagtccataatgtaagccagcaagagaaccaacgagttggaaagaaatttgtgaagaagcatgataaaggcaaagggcaattaaagatcaatgacaactctatgaaaatccagaaaaagacatcatagtgtaataattgtcatttttggaaatctaaacacttccagaaggattgcccaaagcgtaagtcttggttcgaaaagaaaggtgagcttaatgctcatgtatgttttgaatcaaatttaacgaaagttcccataatacatggtggattaattctgaatgtacaactcatgtttctaatactatggagggatttcttgcaatccaaaccataagctcaaatgagaagttcatcttcatggggaatagagtgaaagctttagtggaagcaatcgggatttatcgtttaaaattcgacactggacgtcatttagattactggaaactctttatgtacctagtttatctaggaacttagtttcattatctaaacttgacgttactagatactcttttaattttggtaatggatgtttctataacacctctctttactcactcgtgcttgattgattttagctaaaatattgtgtccactttgtattagcatcaaattagttataaatttttcacgaaattcttttcactttgctttccaagtttacgagttgtctgtaatataaacgattttcctcaccacggaccatgcaaataaaatttcttaatgcatattagattgttaacagtccaagtacagttcagatacatcacagtcccaaatagtttgttacaacgtaaaataaatacaatccagcatagtctcaaatacagacaaacaaaaaaccaccaatataatctgcagaacatccatcagcacataaaatatccagctccttcctcaatgatttacctagcttactgttcttctgctcgcccaaattaattggggtcatcacaggtgtcaaccaccgacacagctcgggtaagtattttaataaacagaattagataattgacagaaatagaataatatattaaatacataacttatttaaaataaacaatgggtatatgatcgcggtcgtacgcaaccaaattaatttgattttaaaatgtagtactaggaaagtgactcctaggtcgtctctcaaggatcaattgtcaatgtttaagggattgaaaacgtgttggggaggtttttgaaggaatttagcagaatatataaaataaaacagaattactaattaaacgcagtgattaaaaacaagtcagacccttagaacagattgcgcctttaatttcctcggttcacgaaagataatctgtcctgcttaatccttatcagtccagattaatcaactaagcgaagattaatctaaaacgtcattacacgaattaagcaaacgtgaacctcgttagggcaaactctcagaattaagcaaactgagaatactgaatcaatcaataccagaatcattaagcatgaatccaattcgaaaaatacagaacaaaaacccaaacaaggaagaacaagcagaaaacgaattagaagaacaagaacctccattaaaggtctgcaatcatgtcctagggtccaaccctaggtttagccttccattaattcgaaattaacaacagaaacgtaatttaaattgaaactaaacattaaacaaaattaagaacagaaacgaaatagaagcagaaagctaaaacgtaaatagaagaagcagaaagcgaaaacgaaaataaaagaagcagaaagcgaaaacgaaatttactaaaaccctaaagaaactgcacgaaaattaaatgttggctggtgtctgttgtttgttgtgtctaagttgtctgtttttgtgtgggcacagaacccctaaatatatagtaactgcctaacctaaaagaatggaccttttcctaacaattttggcccaaaatcactaaagataagataagataaaataaaataaaaatgaaatccatattctgatatggaaaatattaagcataaataaaaacgaaatctataatttgatatgggaaatattaagctgatgctgacgtggcgcactaatcttcagtccataaattaattccaaacccaattaattattaatctgccctgaaaaataaaattagaaataattaacttaaaataatccaaattaattaaaatttgaattattggtctaattaaatcctaaatgagaaataatgcaaaatataaacaattaagcacaagttagggattaaaatgagtacagaaagatgagtaaatagtgataaatagtgactcatcaaaaccctccatacttagccttttgcactcctgggcaaaatcaaaaagtagagtagagcaaggaaaaattctaaagacattaaagaaagtgacacattgtaaaataaacagttctgcacaatcctcaatgaaaactgggaaaagataaaggaattgataatttccaacacacaaagagtcagagagactacacacttatgaaattcatccaagcattcaaaacttagcaaaacaatcaatccgttcaagaggtgaattaaaagcaacagaacctcactagatgcactgtatcatacactgtatctctcaagtgtttaggcaactgtatactctcaaaacactcatgaaaataagcaacagatagacttggcaagcctctataatcaacacccaataaacatgcacataaggatcaaaaggtcttttcagggttgtaatgtggccaaggaaatgggtaggataaaatatgagataagtagctgcaaaccagagggactagaggagcaatggggaataagtaagaagtaagcacaaaaacaaacccaaaaatctctaatcagcctctaacaccattccttttcctttgcttcaaacacaacaacttttcttcaatttattatttttccttcatttctatatttttttctctttttcttttcttttcttttctttctttctcttttttttttttttttttaaatatggtactgactgatatatgtatagaaacatgaagaataagctgaacatcagagtaaaccaacaggccagagatatcatccaaaacaatatatacatgcaccccccttacttattcccaaaacaattccaaagctccaaaattccctaaggttaaggtaatcattgtttttcacttaaggcttgtaatgagcttcaaacaaaagaaaggaaattaggctcaacagggttgtcaaaggaattaaattcagggtaagcttatttggccagaggcttattagaacaaaaatgccttaatcatatccaaacatgcatgagaaccaagaaatatcaaacagagtcaagacaaggcaactgtgcaagcaatcaagaggtatagcacacatgaaagaacagatagtggctcaaatcctcacacacggtatatctgtcacagttaaatcaacctttcaaacttcataatcatctttccaagtagagaaaaacaaggatttcaaaccatacagtatgaaacaactcttatctaagcatgaagtaggtgtcaacacttattcaaaacccagaaatcaaaaggaaacatgcaaaactatacacaggataacaaaaacaaaacaaacaaaacaaaacaaaaaataacagtctctcccccccacacttaaaattacacattgtcctcaatgtggcacaaataaaagttcagaacaatcagaataatgcaataaatatggacacgtgtgataaaaataaaggaggagaaagaaaagaaaattctaaggtgtagtggaagatggaagggaggtagggtcaatcagagatatttcttccacaactgcatctagcaaattttcatcaggaaaattatcctggatgggcaacatctcatgactcttctcagctccttcaattctgctgagatggtctgctaccaaattctgagctccactccgatcacggatatccaaatcaaattcttggagcaaaagcatccatctgatcagtctaggcttggagtcagtctttttcaacagatactttagagctgcatggtcagtataaacaataacaggagaaccaagcaaatatgatctaaatttatcaagagcaaacacaatggcaagaagctctttctcagttgtggtgtagtttgcttgggcagcatccaaagttctggaagcataatagatcactctaggcagcttatcaactttctgtgctaggacagctcccaatgcatagttggatgcatcacacattaattcaaatgggactgtccagtcaggtgcctggaggataggagtagtggtcaacgcttccttaaggtgatcaaacgccttcttacagctatcatcaaagttgaaatccacatctttttgcagcaaattggatagcggaagggccttcttgctgaaatctctgataaagcgcctgtagaaacctgcatggccaagaaaagaacgaacctctcgctcgcaagaggggtaaggtagatgtgaaataacagatacctttgcaggatctacctctatacctttactggaaatgacatgccctaaaactattccttgttctaccatgaaatggcatttctcaaaattcaagacaaggttagtttcaatgcatctattaagcactttatccagactgtctaaacacatgtcaaaagaagatccatatacagtaaaatcgtccataaacacctctatgcaatcttcaagaaaatcagagaatatactaagcatgcaccgctggaaggtaccaggggcattacacaggccaaaaggcatcctcctataggcaaaagtgccaaaggcgcaggtgaatgtggtcttctcctgatcctcaggagcaatatgaatttgaaaataaccagaaaaaccattaaagaaaacagtagtgagatttacctgccagacgctcaagcatctgatcaatgagtggcagcgaaaaatgatctttctgtgttgcttggtttagccttcggtaatcaatgcagactctccaactgttttgtactctggttgggataagctcatccttgtcattctttacaacagtgaggcctgtcttctttggaactacctggactggactcacccactgactatcagagataggataaatgatcccagcttgaagaagcttggtcacctccttcttcactacatccaaaatcaccgggttgagtctcctttgtggttgtcttacgggtttagctccatcctccaatgatattccatgcatgcaagtggatgggctaataccggatatatctgccagggtccatccgatggctttcttacgctttttcagaacttgcaacagtttatcctcttgatcagcatcaagggaagtggaaatgatcactggcaacctctcatcattatccaaataggcatacttgaggttttccggtaaaggttttaattctggaatgggattgggctgatcagaagaaggaaccaaagatggaagaaggatgggttccacagcctgtaccttaacctgcaagtcagattcttgtgtacttcctaaaaaatggttagtgcattctgactctaacaagttattatccaggggtacatcacccaatacatcagaatcaattccagaatagacatcaaaattggacacatgttcagattgaaattcaaagctggattcattgtcagattcacattcagattccatgcatgcaagagaagtataaagatcagatagaaaacattgttttgtagcatgggaagaatagaaatcagaaatatactcatcaacaacatcatcaagaatctcagcacggaaaacagaatgattttcagatggatgtttcatggcatcaagaatgttaaaatgaacaataatatcaccaaattccatagtcaatgtaccagcatatacatcaattttagttcaggctgttttcataaatggcctacctagaatgagggggatagaaccatgggaaaatccctcctccatatcaagcacataaaaatcagcaggaaaaatcaattcaccaaccctaactaaaacatcctcaatgaaacctgtagggtaggcaacactcctatttgccaactgtatcactacaccagtaggttgcaagggaccaagagacatagatttaaaaatggacagaggcataacatttatggaggcacccaaatcaagcatagctttatcaaatttattactaccaataatacagggtatgctaaaagtacctgggtcctcacatttttcaggcatatttggaacagtattacctgccatagaagaaacatttttgcccatgctgactctctcaattccagtcatcttcctcttcctcttattagtgcacagctccttcaagaattttgcatacttcgggatgtgcttgatggcatcaagcaaaggtatattgacttctactttcttgaaaatctccaatatctccttatccacttcttccatctttttgtttggaattgatctaggaggaaatggaagagggatgggaagctgctgttgcacatcagaactagtgctggaagaaggttcatctgcacgaatttggtcatcactttgctcatgtgttggtacaggtgcaggggtaggaactggtatggatggaggtggggacattgcattacgtatatcaatctgttttcccgacctcaatgtgatggcactcacatttttcggattctgcacagtctgagagggtagtctatctgaattttgtgactgtgcctgattaagttgagtagccatttgccccatctggttagtcagactctggatggaagctctggtctcttgctggaattgcaagttttgcaaggtcatctgtctcacaagctcctccaatgaaggttcagaggtagaaggttgaggtgctggtggaacaggtacatcttgttgttgcctctggtactgctgctggactggtggaggtacataaggtctagttgggccagcagaactttgaaatggtggtactggaggtggttgttgttgctgagtattagaccatttgagatttggatgatttctccaccccggattatatctgttactggacaggtcataattatgctgctgttgttgaggtctattattataaatgtttgcagaataagcttgaggagcatcagggccaacaggttgctgttgcagagagggacatgcatcagtataatgatcattggaagtgcagacaccgcaaactctggcaacagaggtggacttttggttaacagcaagttgagtcactaaattcaccaaagcgtctaatttgccctctaatttcgtagctgtagatgaagaagaactagaatgcgcagctacatcatgaactccacgaatagcaatagcatcattccttgcactgaactgctgggagttagaagccatcttttctatcaaatgcctagcttctgcaggagtcatatcaccaagtgctccaccactggcagcatcaatcatactcctctccatgttgttaagtccttcataaaaatattggagaagaagctgctcagaaatctgatggtgtggacagcttgcacacaactttttaaatctctcccagtactcgtataaactttctccactaagctgcctgattccagaaatatcttttcttatggctgtggtcctagatgcagggaaaaatttctctaaaaacattcttttaagatcatcccaaccagtaatggatctaggagcaaggtagtacagccaatccttggccactccctccaatgaatgtggaaatgcctttaggaaaatgtggtcttcatgaacatctggaagtttcattgttgaacagactatatggaattccttcagatgcttatgtggacactctcctgcaagaccatgaaacttgggcagcaaatgtattagtccagttttgagaacatatggaacatcctcatcaggatactgaatgcacaaactttcataggtaaattcaggtgcagcctgctccctaagagtcctctcacgaggtggaggttgagccatattattctcagtataaaaataatcagcaaaatcagaatcagaaatattatgcacaggatgctcagaagaagaatactcagaattcaaactaacagtatctaatgctacagaatctaaggaaaattgcctagaatgcctaattaatctatggtaggtcctatctatctcaggatcaaagggttgcaagtctcctggattgcctctagtcatgcacaatatgcagcatatcaagcaattggcagataagaacaaagagaggtaaaactagacctatactcaaacgaagtccaaatgagctaaaaatttgtgagcaacaccctaaaatcatgaaaagacagcataccaaatttcaagacctaattcaaaggataattaaataaaatagattaaggaaatatagaaaaataggaaaataaaacttcaaaaataaaaataaaatagaaaacgggcttcttttgaaaatccgaccctggctagatcttttttttctaccccaaaagcatatataatacgtcagattctgacggtcggatcaaaagttatggcagtttgaagttttcacaaaaattggttttctaaatttttgtatctcagaatctggagtactttaaatgtttttggtatttttcctaacaaatataagctaaaagaagttaccacacaaaaattcacgaaaaaataacaagtctaactatcaaaacaaaaaatcacaagtaattcagaaaaaataggtactgttcacgctactccttgcgactgccttcctagtatgcgtggcttacttccttgcgactgtgcttcttcctcaataccctaattgctcctgcagaattgattaacacaaccaatatgcaagaaacgaaaatttttgaagcacaactataacaaaccacaattaaaataagaactgatataggagacaggcacaagtcgaaatatttttttttttaaataacagaacacaaaacaaaaacaaaaacacacgcacacaaaaacagaacccttaaacagaactaatgatccccggcaacggcgccaaaatttgatcgcggtcgtacgcaaccaaattaatttgattttaaaatgtagtactaggaaagtgactcctaggtcgtctctcaaggatcaattgtcaatgtttaagggattgaaaacgtgttgggggggttttgaaggaatttagcagaatatataaaataaaacagaattactaattaaacgcagtgattaaaaacaagtcagacccttagaacagattgcgcctttaatttcctcggttcacgaaagataatctgtcctgcttaatccttatcagtccagattaatcaactaagcgaagattaatctaaaacgtcattacacgaattaagcaaacgtgaacctcgttagggcaaactctcagaattaagcaaactgagaatactgaatcaatcaataccagaatcattaagcatgaatccaattcgaaaaatacagaacaaaaacccaaacaaggaagaacaagcagaaaacgaattagaagaacaagaacctccattaaaggtctgcaatcatgtcctagggtccaaccctaggtttagccttccattaattcgaaattaacaacagaaacgtaatttaaattgaaactaaacattaaacaaaattaggaacagaaacgaaatagaagcagaaagctaaaacgtaaatagaagaagcagaaagcgaaaacgaaaataaaagaagcagaaagcgaaaacgaaatttactaaaaccttaaagaaactgcacgaaaattaaatgttggctggtgtctgttgtttgttgtgtctaagttgtctgtttttgtgtgggcacagaacccctaaatatatatagtaactgcctaacctaaaagaatggaccttttcctaacaattttggcccaaaatcactaaagataagataagataaaataaaataaaaacgaaatccatattctgatatggaaaatattaagcataaataaaaacgaaatctataatttgatatgggaaatattaagctgatgctgacgtggcgcactaatcttcagtccataaattaattccaagcccaattaattattaatctgccctgaaaaataaaattagaaataattaacttaaaataatccaaattaattaaaattcaaattattggtctaattaaatcctaaatgagaaacaatgcaaaatataaacaattaagcacaagttagggattaaaatgagtacagaaagatgagtaaatagtgataaatagtggctcatcagtatataaaaacatagaataacatttataaacatagatacatgatagatgatgcatgctttctttattacatgatgcatgactgagatctcagcggcctaataaaaggtactaaaatcagaatagtctcacccactccagtgaaacagtctcacccactccagtgagacctccctccactccgaggggaaaagggtgccaatagttccacccactccagtggaacaatcccacccactccagtgagacctccctccactccgaggggaaataaatgcaaatgatgtatgtaatgatttctttttattttccagttattctttttaattctcaaattctcatatcagataattccacccactccagtggaatccataaataatcacagcacaatcataaggattttaacacttcaccattattttaatacacatcattaaattcatttctcaacatcaaaatcataaaatcaccaagcaacatattaatctttatcatagttcaacgtcaagtggacagcaacatcaacgaataaaataatatactgcaacttaattaaatacagcaacctcataaaatatacagcaatatacaacaacatagtatcatacagcaatcattaaatacagcagcataataaaatgtttagccacacacagcaatataataccataagcaacattaaatacagcaacataataaaatatacaacaacaacctacaacaccatttagttacaaatatacagcaacatattaaagtattatacagcaacctatacagcatatttggttacaaattcagctccatacagccacatattaaatatcatacagcaacataaataaattaatatacaacaacccaattagatacagcatcataaaatacataacagcatacagcaacttattaaaatatagattatacagcagcatacatcctattattatacaacaacattaaatacagtaacctaattaaacatgcagcaatgtacaacaacctagtgtcttacagtaacattaaatacaacaatcaaataaaatatacaacagcttaattaaatacaacaacaacatacaatatcattcaattaatttgcagcaacagaaatctaaatacagcaacattaaatcaatatacagcaacattttaaaatatcatacagcaacacctactgccttatttaattacaaattctgctccatacagcaacctaatcatacagccttattaggtttaaaataacaaccaaccatattaaataattaattattacaacattaagctagtaataaaggaatacaacaagtaacataaggccacaaagtggatttaattattttagacagccatctaaacaagttcaagctaattctttgtattctagttcgttgagaattttaatcaaacacttggtaggctagctttaggtattttaagtaagaaataatcatagctttaagtttcaataaataggtgttaaatcaatccatcaagtatctaatccatgtttattaaactacttcccatacctttgcttttctttgttaaaatttcagcaacttggtctccaatcttctagccttcttcacgtgaacttgcttagggtggtacctttggttttgctttgtattttaagtagaagaaataagtgaattggatggctgaaataggaggaaatgaccgtgcaattcagccccaccaatccctttttatatgcttaattatttggcctttaagtgaaaaatcttaagcttcatgattacctacctttttgttgcttccattttattggttattggattataaccctacatgtggctggacatgtggctgatttcatgatatttccacactattcttagccttgttcgtgtgatagcttgcttaggtgcattcttcttgaatttaagtcatttacgtgggataccttagaagttatagatttttgtttaaatcatgattaagtgactttccaaatggtccaatgatgtgctatttggctttttaaccctacaagtgtattggttcttgattattctcaaactttcttcccttttccttgatgtgcacggccaagcttaattttgaagcctaatatattgcaattttggcttacccgtggaatagctaaaattgtaggaagtttcatgctttattttacttaacacattttcttatattgaataacattatttctataatttatgaaagcatgattctaagtatttctttgagaataaaagtctaaaaattatttagaaaactaacttaaggtttagtaacaatctttgggatgttatttaactttcttttaatggcttttatctacattcttattggttcattttatcttaaattagtaaaatgactaattcattccttttataattaaaagaaaactccatagattatgtccatccttctctcataatttcccgatgtctaagttagcctagattaatcccttttttaaaatatcttccaaaattcctataaatttttgtttgaggttctctgtcaccaaccatgttgataatttgttgtttaaaggtattctatcccatactaaggttcccactattttctaaagtcatctggtcatttttgacctaaagggcattttagtcatttactatcatcgggacgtaatggtaattattcaatttgttcaaggacatatatgtaatttcgtctagaaatatcttactaaaatatctaggatatattggtcattttcaaaaatgtctaagggtataaatgtcatttttcatcctgggacataattgtaatttatgaaattgtccaggggcattttggtcatttacaaaatatctaggggtattttcgtcatttaccctagatccttctatattgcctctaattaatattttaccttagtaattgactgttattcccaaaattttggggtgttacagtttcagttcatttaagcataatcatttcattggtacaactgttcttttttatggtctatatatattgaaattagatggtttgtatgctgaaattgttttaactctgcatcataatgttggcaccaaatgtagtttagtgaatgaacgatatgctttcttgtggcatatatgtttaggtcacatttctagagaaaggatggaaagattaataaagaatgaaattcttcctaatctagattttacggatctaaatatttgtgtggattgtattaagggaaaacaaacaaaacatacaaagaaaagagctacaagaagcactcaacttcttgaaattgtgcatactgctatttgtgggcttttttatgttaattctttcggaaaggaaatatactttatcacttttattgatgactattcatgttaaggttgtttacttactgcatgaaaaatctcaggcagtggattgttaggaattttcaccacggctagcgtaccgttgttatcgctgtaagtttcaaatttataaaagttcgtctccacagggatttgggtttacgtcggttgagttaatttaacagtttagtagttatgtacagatagaaaacgaagattcatttgttgttgttgttgcggaaaatgtaaaataggataacggaaaacaaataaacgatgacgggaaatgaaataaatgatacaagtcaagtgagtataggattgggtttcgtcttgcttatccctttaattgattttacctatgcattttctattcttgttgacgcacacgtttaggtaaacttaactcgattcctcgcaattaagccctatggatattttactaaatatcgattcctcgcatacttaattaaatacccaagcattaagatcatattcacgtgtttaatgcgatcgaaacattatgttctattcctagcaatgtaacgtaacgagtaatttaattcagttcaaaccctaagattactttccagtctcacttaggaatttaagttcgtgaccctagtgatcaagtagaataaagcattaagcgtagaatgaaattaccaacaagaagtagaatgatgcataaataatttaaaagagcatagggataagaagagtacacccaatccttagagaagcttaagtgaacatgagcagaacctcctcgagagactgaccgattaagcacgtcatcaaccttcgcttcggcagaatctccttacaaaagtcactcacctcacttccctaagttctacactcacttaggactaagaaaacaagaaaatggagcaagctggtgccctaggagagaagagaagtggaagaatggtcatggccttcaagaatccgtccactatttataggaaatgttctcctgctagcttggggcgcccaggcgcccaatttaccctattttcagtggcctgggcgagctaaggcagtttccggggaagtgtgggttgcccaggcgaccaaaatacatgaaatggtggcctgggcgagcttaaacttagccttgaagaaaccattgggcttttgcttcctgatgggcctgatttgcttgcggaacttcccctgcttgatatgtacaccttccttacttgctttgatcttccggaagcctcgaaaatccacgaaatctatcaaatacacaacatgatttgattaatcttccaaaatactttaaatacaagtacaaggtgcttcttaactaggtttttgggaaatttctaagataaatgaaataaatcaaaagataagtgccagctttttgatcatgaaattgcctgaaatgtggcacttatcaactccccccaacctagaatcttgcttgtcctcaagcaatggtaaagatatcatgctttaacaagaatcaacttaatgtttgatcagaacagattttcaaaaggtagtcaacctttgatactttgagaaaacaatttggtggattttcatgaaatcaaaatgaggttagagtcaaatttacacttcatttcaaaaagacctcagaggaaacatttgactaatatcaaaacagaggaaaacctctcaaaaagtgtttaattctcccaaaggtaagtgtttactctcacatccatcactgatatatcttagataaaatttgcagttcatttcccatcaaatcataatacatattcatcatggatcattaggtcttttatggctaggctgggctagaaagaaatcttggtttttctagatattcaaaagaccattaggactaggagagcaagctagaaacatagacatttaaaccttttatttcctattccttttctctttttccaagacatctttcgctttttctttttctttttcacccaacttttctttttctttcatttttatttttatttttatttttcttttatttcttcctttattttctttttctttttcacataaataacatataaccactgctaaaattctttttcattctcataactatccaccaaaaatcttccatagtgattcactcccctttttgctctcctaaccttaggtagggtatggaattcctatcctaggctggggtttgaataaaatatcactgttttgggctcaaagaggtgttcaaaggataaatcatttaaatatgttggaatagctttttggccagtggctaataatgtatttcaaagaaaaagatggcctaaatcatatccatgaatcatatgcttataacaactagaaattcatgcaaaaattactatagattatattagtgagatctctctgtgtataatgtctgtttagatgcacacactcacttgggctcaaggtctgttttcctgtttttcaaccaaatcatttgtgtcctactgaagtttatttatcaatttccatgcaaaaagactttttaccttaactttgatttttctgaaaataccatttattcttgtttttcatttctcaaggtttcctacaaaaacttcatttttgtggttctgatcttttaaaataattttcaaaacattttcagttgaatcttttcaaaacatgacatatcagttaagcccaaaaagatttttacaagcaaaaagtattttaacatgtgtaatttagaaaagagaaatttctatgtgcaagcaaaaagaagcaaaatatagtaactaacagacaaagtactgaattttaaaactataaagcagtaaagaattttaaaacgatatcactgtttttgaagtttgtggctgagaagcttgatgtcctcccttcagctaatcaacaaaatctgccacgttcttttccttgcttttgccttcttcttaacaaaatgtacctataaccaaattctaacaaaacaaatgatattttcaaaaagataagatataaactaaagacagaatttaaaaacactgggttgcctcccaggagcgcttctttaacgtcgttttagctggacgacttagctatggctttgactccaaatgattggaagatgtggacgagccattagctactacgtcttcctcatttaagacatccaccttaaaacattctctatcatttgtagggtgtttgatgtcttcaaaaacattgaattggatttcatcattttgtactctgacagtgagctttccttcatcaacatcaatcagcaccttggcagtcttcataaagggtctgccaataatcagtggaacttcactgtcttcattcatgtccattactacaaagtcgactgggaagaagaatttgtcgacatttaccaacacatcttcaataacgccatatggatgcttgattgatctatcagctaactacagtgtcatcctggtaggcttgactataaccccttctatcctcttaaccatggataatggtatgaggttgatgcttgcacctaagtcaagaaaagattttcctacagataaattaccaatagtaacagggattgtaaagctacctggatctcgagatttttctgggagagtcttttggatgataacactgcatcctgcatccagctcaattgtcccctcattgatgtatcttcttttcttggtgaggaggtctttcatgaacttggcgtattttggcattttctccaacgcctcagaaaaaggaatgtttatgtgtaactgcttaaagatgtcaagaaaatgcttgtactccctttcctttgaattcttgattggagcgtgtggatatggcattctttggactggtagtggggttaaggctgccttgcctttgtcactccttctctttttctcctcaattgtcacttttctctcaattttctcattaggttcatcctcttctttttctttttcatcatcttctttcctaccaaccacagttccccttcttgtgataatggcattacattgctccttggggttgacttgagtgttggctgaaaaagatcctcctccatgctcagctacttgttttgcaagttgtcctatttgaacttctaaattcttgatagaagcatcggtgttcttttgattgctgatggatacttgcataaactgagtgagggtatcttccagctttgttagtctatcagactgatcttgctgtggcatattgctatttggaaaagaattagaagaacttgcaaaaggagggttagtggggacatttaagcattataagtattaaaaggttgattaaaacctggaccattgcgataatcttggtaattcccttgatagctttgttgaggtcttgattgattttgcatgtagtgaactttctcctcttgtgaaaaattactaggtactgaacaatggccattttgatggttgcctccacagaagtcacaactcaaagtttgttgaacttgatgtgctttgtgtgatccttcttgctgaagttgaggaagttggcctatttgctttgttaaggcctctaattgctgggtcaagagcttgttttgagccaagatggcactttgagtgtcaagctctaatatccctttcctctgaatgggtgacctatcatggtgagactgatagtcacttgcagctattgagtcgatgatcacgatcgcttcttcgggactctttgacatcatggttccccctgctgaagcatctaggatcatcttggtttgaggcctcaaaccactgtaaaagatatgtaactgagcggcgtcatcaaagttgtggtttgggcatctcctcaatagtgacttgaatctctcccaagtttcacagaggggctcatcaactccttgagcgaaagtggcaattgcggacttagcgctgatgaatcttgaaggaggaaagaatctagcgatgaatttttcttctaattcttcccacgtgcttagactcttgttgggttgtgattgaagccaagtctttgctttacctgtcaaagagaaaggaaaagctctaagatatacagcttctgcatcctcgtccgatgctcccatcgtgctacacagctccatgaaagtagatagatgcgtatatgggtcttcatggtctaatccggcgaaaggatgaaagccaatgaggctaagtagtgcgggcttcaattctacaactttgttatgaaacggaggaaaaactatgctattataatgcttgggcctttgttggtaggcatagtctccaagtgtcctcctcggtggttgtctatcttcttctccccctcaatgtgcttgtcagtttcttgtttctttttctttcgaagtttcctttcggttttggagatttccggatcaaaatgagatttatctgtagacttatctcgcataaagggaaaggaaagaaactacaagatttctgttaagcacagaggttttaaaataacaaagaaatatagacaaagaaatatatacaaaaacagaaaataaagaacaagaaaatactaaactgaaatttaaaaacaacttaagtaaacaagccaaatccccggcaacggcgccagaaacttgttaggaattttcaccatggcaagcgtaccgttgttatcgctgtaagtttcaaatttataaaagttcgtctccacaaggatttgggtttacgtcggttgagttaatttaacagtttagtagttatgtacagatagaaaacgaagattcatttgttgttgttgttgcagaaaatgtaaaataggataacggaaaacaaataaacgatgacgggaaatgaaataaacggatacaagtcaagtgagtataggattgggtttcgtcttgcttatccctttaattgattttacctatgcattttctattcttgttgacgcacacgtttaggtaaacttaactcgattcctcgcaattaaaccctatggatattttactaaatatcgattcctcgcatacttaattaaatacccaagcattaagatcatattcacgtgtttaatgcgatcgaaacattatgctctattcctagcaacgtaacgtaacgagtaatttaattcagttcaaaccctaagattactttccagtctcacttaggaatttaagttcgtgaccctagtgatcaagtagaattaagcattaagcgtagaatgaaattaccaacaagaagtagaacgatgcataaataatttaaaagagcatagggataagaagagtacacccaatccttagagaagcttaagtgaacatgagcagaacctcctcgagagactgaccgattaagcacgtcatcgaccttcgcttcggcagaatctccttacaaaagtcactcacctcacttccctaagttctacactcacttaggactaagaaaacaagaaaatggagcaagctggtgccctaggagagaagagaaatggaagaatggtcatggccttcaagaattcgtccactatttataggaaatgctctcctgctagcttggggcgcccaggcgcccaatttaccctattttcagtggcctgggcgagctaaggcgatttctggggaagtgtgggtcgcccaggcgaccaaaatacacatgaaatggtggcctgggcgagcttaaacttagccttgaagaaaccattgggcttttgcttcttgatgggcctgatttgcttgcggaacttcccctgcttgatatgtacaccttccttacttgctttgatcttccggaagcctcgaaaatccacgaaatctatcaaatacacaacatgatttgattaatcttccgaaatactttaaatacaagtacaaggtgctttttaactaggttttagggaaatttctaagataaatgaaataaatcaaaagataagtgccagctttttgatcatgaaattgcctgaaatgtggcacttatcatggatgccttagaaatttactttaatgaagtaaagacaattagacagaaaggtgagagttgctaggtttgttagaggtggtgagtattacagaagatacgatgaaactgggcaataccaagttcatttgctaaactccttcagaaacgtggcatttgtgcgtaatacacaatgactggtacaccacagcaaaatggtgtattagaaaggtgttgtaggattttaatggatatggttaggagtatgttaagcaattaactttacctgtatctttgtggatgtatgccttgaaatttttcatgtatttgttaaatagagttcctagtaaggcagttccaaagacaccttttgaactgtgaacaaataagacacctagtataaggcacctacatatatggggttgccaggcagaaatacggatttataatccacaagaaagaaaattggatgcaagaacaatcagtggatatttcattggttatccagaaaagtcaaaagggtatatgttttattgtcctaatcatagtataagaattgttgaaactggaaatgcaaggttcattgaaaatggtgaaatcagtaggaatatagttccatgagatgttgaaattaaagaagttagagtacaaatccatttaacttgtgcctctagcagtaatgtgattgttccttcaattgttgtttgaaacaacaatgaagaaaagccacacaataataagcccatgatacataatgaacctattatggaagaaccacaagaagtagcattaaggatgtctaaaagagaaaggagacgagctatttcgaacgactatatggtatacctatttagatcatcaggttgctggatatgttgactgggacttcattgataattgttgcttattttcggattttttgtttacttgacctatcttctttgtgcaggatttattggatcctacaaaactccaaatggaccatatgagtagtccctagaaagctaaggaaaaaagctacaattttgtctaaaataagcttggaccaattctttcgttttgagggtcattttaggcttgaaaattagtacctctgcacttggactttgggctgtgagattaggctttgatttgcgtagttagcttaattaggtatattagatgggcctaatcaaggtccatcttttcattttatccagtcaaaatatatattagtgtagttagtcaggtacttacttcattttgtaaaaatagatttgagaagcttcatgtgcaagttttaggatcaaagcctattttctctctttttctctcaattgttcttcatttttcttcttcctttcaacttatttcttctcttttcttacacaatgtttgttgctttttccattggtgatgatcatggagggctaaacaatcaatcaatccaaggattcagtccaagcaaggaagaatttgatatttcaatctctgtgtgaatgttcatcttcttcttcaatcctattttcgattttcatgattatgaatgtgcttaagattgaaaacggattatgttatggattcatttcctaatttcaaaatttaatcacagatttcttggatgatatttcaatcaaatttgtgatttcaattgatgaggagttaattcgattgaattgcttctaatgacattgactgaactttcacaataggaacattatttgtagaactgtgataattcaaattgtttggtttagtgaattggattgatgttcttgaatctatttcaaacctatttcattaattctattagtttcttcattttatgcatttctgttgtgtttatgcaatttttcgttcattgtgtgcaaaccactcgttgaaattccccttgttttatataagtggattgagatcggaaccaaagtgaatcgtatatttgagtcgacctagattattcatgtactacagaattaatcctagttttatttgtttctttaacgatttgacaatcgttattatgctcaaatttgtactttaccaaacataagcttcgcagttggaatgttacgaagatatcaaagtaaaccgagaatggaacactggaaagctccaaagatggttctgatatacttacagggaacaaaagatcacatgcttacatataagaggtctgatcaccttgaggtaattaggtattcagattcggactttgttggatgtgtggatacgcgaaaattcactcttggctatgtatttttttagctggaggagcagtatcatagaagagtgaaaagcaatcagttgttgctacatttaccatagaagctaatttgtagcatgttttgatgctacaattcaagctaagtgactgctgaactttatttcaaggcttggaattgtcaacagtattgtttaagcccctgtaaatgtattgtgataactccacaacagtatttttctctaagaacaataagtactttatacaggaaacaatccaattccaatcatatacaaatgttatggacaacaaaactctctaattatttaacaaagttgcatacttagaactcgaacaataatatattttaaattttaaataattttttattgttaatgtgtaaagtatattttttattttattcatatatttttaaatcttaatatgtattttttctatttttgtggtctttccaacaagctacattttaatggataggtaaaaaaataaaaagataaaacaaactacattttatggattcaatggttaatgaaatggtgcattaaatatttaaacttttggaatttactaatttgcaccaaataaacattttgtaaaccaccaaagactatatcacaactaacaaaataataaataagtggtgtggtagattttggagtattctaactaactaattcagtagcatctgagttggcatcactatgatatttgtcaatcatgcatgttgaacttggagactaaatgttaaagttaagataggactgatgcatgcttctgtgtgtgtattagctacatctgagctaacatcattatgatatgtgccaaccatcaaccatgtatgttcaacttgaagactaacgttaaaagacaagatcgatgaatgttctagtatatatatgtcagctgcttgggtagcaccaataaagtgaaaaacccttatgagactaaattgaagaccttccctaattaacatgacaaccaatatctaaaactggacttttaaactatgtgcaaggtgctcttgttattataatagaaaatagtagtgcatgtaaaaaaatggtcaagtcttttagcaaaagaggaagccattgcatctcacatgtaatagaagccaaatgatgaagatcaacttacaaattgcttgacttggacaatttcagaaatcaacttcaagagctccatggatgaatgttcaagaatacaaaaaggaaaaatagaaaaaaaaaaaagtagaaaaaaagtagtagaacaacaccatgattaatgcaaatagataagtcgaggaggattcaccactaaggattgatagcatatatgtaattattgaaaatctgttatatttggtaaatatctcccatattatgttaggcattatttagctacaaattagtcaaagattcttataaactctagcctagcttgtagctttgacatcagcatgtatcaatgtatattacataaacagaggaatgagaaactcacataatatatttccttcatggtatcaaactaggtcttctccccttctccacctagcttgtattcccaccacctctttttactttcttccgctcccctcctccgtgttcgccattctcaatggctgaccaaccaaagtttcacctggctctagcaatcacaaacgtgaaatccctcctaccagtcacattagacaatgggtagccctcttcaaagtttaagcactagtccataacatgcttgatcacatcgtccctcctacggataagaaggctaagaaggtggcagatgatgaaaaagcaactgatctcaatctttggcatcgtcttgatgcagccatgttacaatggatgtatgccaccatatcacaagacattctcaattcaatacttgtgatcaatgacttggccgagcagtgttggaaaagaattgttgctattttccaagacaacaaacacaagagggttgtccacctcagaaatcaattctcaaacacaaatttggaggattttcctaggaccaaaggctattgcaaccgcttcaagctactagccgattaattggttaatgttgatgctctgatctctagtactcgtttagtcttgaagatgattgaaggactaatcgatgcctatgttagttttgtaatatacattcaacaacataatcccttgccgccatttgaaactgtcaagtttagattggaactcgaggagtcaacaattctttaactggtcgctcatgaatctggctcatcttcttctatggctacccatgttgcaaattcccaaaattttgttgatgatatgaatcaccaaaattcctcttaaggtaatcataaccataataataattatcatgggaacaggggcaacaacaagaaaacaacaaaaattcagttggccagaactctgccaaaggtggccacggcgaaggcggtggatccgacgataggcaggttactggcggtggcaatcgtggacaacagcagcaatggcaggctccttggcaatgggcatggcagcaaggtgctccttggattgtgtcgccatgtccatatccaacatatagttgggccaggcccaatgcaactcaaaggccacgcctggcctccttggatctttgccacaacaggcagcatataacgctaccacacccaacccaacagaaatcaaagtagctcttcatactctaagtcttgctcaaccagacccgtcgttgtatatggatactggagcaacatttcatatgacttcctcattaggtaatctcttgtcttattttaatttgagcaaaaataatggtataattgtcagaaatggccaatctattattagtggttttggtagtgttaatttatcacccccacaccctccattagtgttaaaaaatgttcttcatgcccccaacttgattaaaaacttagcttcagtccacaaatttactactgataaccaagttttcgttgaattttgatccatttggcttttctgtgaaagatttccagatagggatgacactagtgagatgtaatagttggggcgagctctattctattaccaccaccacaaatcaagccaactcaccttcaacttttgcatatttgtcctcttccctatggcatgaccgtttaagtcacccaagagatcttgtcttagactcccttaggtgaaataattttatagtatatcataaaactataaactctcatttttgtcattcttgttgtcttggtaaacatgttaaatttccatttgttgatcttcataactctacttatatgccatttgatattttgcatggtgatttatggacatatcccattttgagttctgcaagtcataaatattatgtgctctatttggatgattattcaaaaattttatggacttttcctatatccaaaaatctcaagtttattccccttttataacctaagagcctatatcaaaactcaattcgaacgggaattgaaaaatatccaatgtgacaatggtagagaatatgacaatggtccttttttgaatctttgcaaagctaatggaatttctttttgttttcatgccctcatacctcatctcaaaatggaaaagccgaaataaaaattccttctattaacaacattattcgcacattgttagctcatgcttcactacctccctcatttgggcaccatgcattacaaatgacaacatatctctttaacatattaccaattaaaactctcgcctatcaatcccctttgaaaattctataccaaaaagacccatcctactctcacttacgagtttttagatgcttatgttatcctctttttcctaccactatgataaataagcttcaaccttgctccataccttgtgtctttgtaggttacccatcaaatcatcgaggttacaaatgctatgatttatcctcaaataaaattatcattagtcgtcacatattatttggtgaaaatcaattcccattctcagagttacatactcaaacctccttcacttattatttcctaaatgatggattttcacctcacgtgatccatcatctccataatcaagccactcctcaaacaaatatgtcggcccaaaaaactcaaccatcaccttagccggcccaatcagctcacccatctcctcagccaccccaatcagctcaaacttctgcacatctagcctagtcatcaccgtcaagccccacatcttcttcttccacagtggaccactcatctcttggcccaaacacaacatttgctcctcctcccattttctagcccacttcgactttagacaacaaacctattatgaggagccaacatggtatttttatgccaaataaaaaataccacatggccttctaactcatgtcagaaaatcacctttacatcataaccctgtgtccacactcaaagactcgaattggaaaatggccatggatgatgaatataacactcttattaaaaataagacatgggatttggtgccctatccacctgatgttaatgttattctgtctatgtggatttgatgggttcttttgagaggcataaagcccgtcttgtaggtgatggtctaggtcaacatgttggcatggattgtggagaaacttttagcccagtagtcaaatcggagaccatttgcacagtgctcaatcttgctctttctaaagcatggcccattcatcagctggatgttacaaatccattcttgcatggtgaactaaaaagaaacagtgtacatgcatcaaccttaggtttcaaggatctagattgtactaatcatgtctgtcttctgcgaaagtcattatatgggctcaagcaagctcctagagcctggtataaacgatttgttaattatgtttcttctattgggtattctcaaagccagtctaacaactctcttttcatctactggaacgatactgctatggtttacattcttctatatgtggattatatcatcttaacttcttttgataatcttcacaagtctatcatgactattctcagctaagaatttgctatgaaatacttgggtccactaagttacttcttgggtatagttgtgactcgtcatgcaagtggcctatttttatcttaaaaaaagtacgcataaggaattattgaatgtcttggcatgtcctcttgtaagccttgtcctactccggttgatactaaaccaaaactcggtgctacttccagcactccatatgaggatccatctcactatcacagccatgcaggagctttacattatctcactttcatgagacctgatatctcttatgcggtacaacaaatctatttatttatgcataattcaatggatggacatatgcaagctcttaagtgcatcctgcgctacattcaggtacacttcatcatggcctgcatctttattctttggtaagctctctgatttcttatacatatacatattagggtggatgcccagatactaggagatccacttctggttattgtgtttcttggagataattttctctcatggtcttccaaacgtcaagccacactttcaagctctagtgctgaagcagaataccgaggcattgctaatgtggtttctaagtcatgttggttatgcaatcttctgctggagctacattgtcctattcataaggctacattggtttatggtgataatgttagtgcaatatacctttctagaaatccagttcaacatcaacgcactaaacacatcgagatggatattcattttgttcacgagaaagttgctcgtcgacaagtacgtgccctacatgtcccctcgcgctactaaattgctgatatttttacaaaaggacttcctttggtgttatttcaagattttagggacaatcttagtgtatgcccgctttgacttcaggggtgtgatagaatatatgtaattattgaaaatttgttatatttggtaaacatcttccatattacgttaggcattattcaactataaatcagtcaaagattctcctaaactctagcctagcttgtagccttgacatcatcttgtatcaatgtatattacacaaacagaggaatgagaaactcatggaatacatttccttcaaggatttcatatcctagataagaatcatggttccattgaagaaactcgagaagcttaaagctctcactcaagcaaaggttaatttcattaaaagttattaagttgtttacaagaggaataatagacaatttataccctaattaatagacctaaaaaaggtgatttagacctaacaatttataccctaggattagcattaagatgatagaatcaacacatgcttgtcaaggacattgaacacataaacttataaagtttttgagtcaattcttcttatatgcgcttgcttcttgctcttgtcatgggaccttctaatcttgaaagcacttcctcaaggccaacactatcctcttccttgttagtttcttgtagttatatgtcaccatagcaatgtgtttagcttttgaagaggaatgtgaaaaatccaatatatatatatatatatatatatatatatatatgttccacactactttttgttgttacctaagctttgctttcattttaaattctctcattgaaacaaaggtaatagacacataacatattgaattaggggacactcataaattgagaggagatagaatgaatatatttagtggttttacaatttgttttttattgaacatatacatgaaaagttagtaattatattgaatttattctaaatctcacgaagaattagaacttatgtaatatactaacaaaaaagcggtgtgataaaatttaaaatattttaagaaaaaaaaaatcaccctgaaagttagtcaaacatatttaattatatcaatccaaattaaaaactattttttcaacttatatatcattcattagtacttagtatcaggagaaaaaaagttattaaaactaaattttcaattaaataaataatatttttgagatagtaatattaaataatagaaaatttacttatatatatttgatatctatacgaaacgattttttctctctatttgagaccaaaagagtacatcccatgtgagaccttttataattggaaagcctaaaactttggaaggaaaattttgcaagtgaattgacacctccagacgtcctacactttccatgtgacacctttataaattgtattcttttcttattggtccattatatattgtactgcatatatatatatatatatatatatatatatataattttgagagcattctcattgaatggagacaacaaaggacatgcaggtggaaacaaaagaaggaaaagagggtgcacgcttataaaatttcaaatcagtcactgtattttgtccagggcattaccgaaagccaaaaaaaaaaataaaaacaagtaaatcatgatagaggaaattggaagcaaagcctaacaaaaactactttaaagggcaggaaatgaaataatgcttaagacaataaaagaaacagaaaaatctatacaatttttttcagtttttgttttttctgacttccatgttagtcccatctttgagagtctcttgtgcatcattttccattccgaggctgaaaagacaagctgcttgaagatacaaagaagtaggccactctggagataccacttgggcttgcattgcatccccaagagcttcttgtgccatatcattcatcaaataagacaagcagcgtcttgcatacactgtgggtgacaccatggtccctccatctacgaactgaaaaaaaaaaaaaaaaagcataagatatagataagtaaattatgctagagtttaatttttttttttttctaggacatagttattctctatcagggacactcgtgttcgagtcacacttgacctcatatcactaattaaactagaataattttataccaattgatacacacacttgatgatggttaggtaagagtttactttttgtcttatatttttttttaataaaaatcatccttttaaagtaattattgtaaaatttaacatatatatatatatatatatcaatttgtgattaaataaacatgtaaaaatattttataaatgagtaaataaactattttctccttattttatttttaaaccatcacatctacaaacaacttaaggctagaaggaaaaggcctaaacaacatctactaatgccctgcttgattttgtagtgggaaaccccaaacatgattttgttagaaaaaaaatggttgtgaagttaatataaagtttattcttaaaaatacatttgatgcagaagtaagaaaaaatcattaaaaatgtaactttttcatttgtgggttatacttttgaaagaaaatttcttaaatataaatcactttgctttaaaattaattaaaattagtttttcaaattcaggacgatgcaaaattaagttaacaaacgataatccaaattagatgtttagcaagacagtatgcaacatcagtcattgcaactctgcaacattaacattaagcatagcatccaatttaagaaaaaggtccttaaattaaaatccacttacttgagtgtagcagtcaatggcagttacaaagtccttagctctaaaagcagtatctccatgcttcttcaaattcaaggtctcttgcatttgactggtccacaattgaaaggaaagctacaatttcaacattaagaaggatcaacattagagttggtaaccataaaaatagagggaaaaagtgtgtaaacaaacctcattggcaattccttcatcatccttgtaaccagtcttctccaatatttcatgtattgcagtaaggtccagtctcaaacaagcttcaccaaaaggtgtcaatgacaattgctttgttgaggatgcagtttcttgctggagacccatcagaacatatgaggggacctgctcatatactatccaaatgagaaattataatcttcccaagatgggtataaggttctcacattgcttatataacatttgtttttgtcatagatgcttatacaacatcttaacaattaaactatacggaaacactagcataattacaaactatgtgcaaataagattttaatttatatacatttttaacattaaatatttttacagtgaaatataataagatattgagaaaaaaagttataccttgataatgtaaatttagttttatattgttattcaatcataaactataaacgacaatatatgataagtttattgagttttacaataattatcttaaaagtcatacaaatgatgatttatgattagatattagtctgaatttattttacattatcagtgcataaccattaaactctaagacattttttaatctctatatcatattaataaataaatgataaggcaaagtagtcaaatctcattgaatgtcagtgcaaaaatgttttacaataataatgtatataaattaaactttaataatcatcatatacttaaatttcaattcactttaagtgataatcagtcatcttaagaaacacaacaactggaaaagaatatggaaagtaaggaggtacttcatcagcatgattagacgaagtttccccaatgctgctaaaatatcaggttcaaaaataagggaagaagtgaaatatttgcgtaataatagtataataatagatctatgagacctaagtataaactattattgtaaaagcttatcatgcatggaatatacctctgtttctttctgaagtgacaaaagagaagcaacaagagactttgcatttggcctctcacgagcttcatattgtaaacaacgagaagccaaacgaaccaactcagttccatcatcctttgaaaagtgaccctctaaggcagaatccatcaacatcaaaaagtttttgccacgaattaagtcaagtgcctgtaaaagaacaaaagtgaatgctgtgaatatcatatttttgttcttcattgagtttggtacatcaatgaatcaccttatttagacatggtctgcatgaacattaaagatttaacacagatatttctacgtagaagtactattttgaaacttgaaatagatccaaataattaatacactatgagtctatgactaatataccaaaagattgtaaaccagtattttttttttttttttgcagttattgtaaaacagtataaacaatatactagaaaagtttcaaaatatgtcacattagaatttctataataacaatttcttgcttatgatattgatataaattatagtgtcccacgctgaatgtgtattttaagcaactatatcagccattgacaccatcattgtccaaaatcaatggtgtgaagatctcatggaattttagtttgtttagtacatcataatggaaggaaaagcttacatggcttggtggaatatgtttaccactcaagagatctagcagcagagttccaaaactgtaaaccacactctctggagtcactctacctgcataaaaacccaaatgtaccaaagaacagtcacatactaaaatatgtaagcatacgcaaagtaacccacatatgtttccctcgtctaaaaggaggattttccttagggtaaggaaacaataaaaaaaactaaataaaaagaaaagacaagatgaatttctagataaaaattccaatataatttggtcaaattttatatttctaaaaaagaaaatcaaaagcaattaattttttacttatttgcagaagaggatgtaaaattaaatgcaggccccctttgtgatacaatgaagatcctgcttaacaaacagaatagtacaacattatccatggctctttgaccattctgaagtatttcagaccaatctatacttttatggctgattcagtggcagattcctcagatctctttcagttatgccaaagatccaggacatgctttctcatgcaaccaacacacaaacatcctaaaaactttaccagtccttaagtactcaggaggggtgaaagccaggtttgtactgtaactcttgccatctctactgttcttcatgagaccaaagcaagacaacctgggattagcatcctgtgtatacaacacaagccagtccaagttacaaataggaagaaacaagatttagttagaacttggaagcatttattaaccaccaattatacctgatcaaacaagatcctgtaggcattgagatcatgatacaaaccccttcctttactagtgcaatattctagagcttgagctaagtagaaagccaccctcaacctcattgcccatttcattggctgtgcctcccctgcaccaaatagaccatgatttatttttctatgttcagaattaaaaggcatatgaccacaatttaaggaaagatttaaaacccaacaaagattaatataaaagttaatggtattcacaaacaactcacaatgaaagagatgtttggccagagtttcatgtggcataaactctgctactagcagcctctcttccccttcatagcaataaccaaccaaatttgctagacgttcacttctaaggctccccacttgtttggcttcctcctaaattcacatgacatattatgtcaaattcaatacaagaaagaaaaatgcaagaaagttaaagtttctttacattgcattccgcaaacatattttcagcctcaataccaaggttttggagatctctgtgactgtatcacgaccacaattgtgactacggcgtggagatctccaaaacagcatcgcaaccataattgtagctacatcagctgcattcggagatctccacaactacatcacgaccacaattgttactatatcagctgcatttatctacaacaacgttttaaaaaactgtttgtgactgtgatttcagtcacaacttcaccccaacagtaattgtggttgcattagccacatttacccacaaattctcataatatcaaggatagagacaagactgcaaccccgaccacaactgcaatttaaaaccttggcccacaattatctttagaggccttttaaaacttgacaaaagtaggaaaaaaaatgaagtgtgagtgcaagttacaaacgaggaattggcgagaatcaggccaagcaaacttgttgaaacgtttgatggctatccactgtccattatcaagttttcctttgtaaacaacattgggagctttttcaccatgctcagacactatgttttctgaggagaacccatttgtggcaaccttcagttgctccaaagtaaactcaccaaaacttggccacaattttctctcacccttctcaccattttctgcaacaaagaaaacatttttaaaaggaagcaagagtttctagacaaagggtggtgtgtgcatgtgagtgtgagctgaaaatacaaaaacaaagaacaacacaaaccttggtcagacgaatcaaggacagaaggtttgaagtgggagtggaaccagcagaaagagaatttagagcaacgagcccccatgtaagtgcaagagaggaagaagaaagaacaaaaaggtgcagttgaaggtcgaatggctaatgaagaatgatcacacagtggtcattgttgtgaaccttttgtgtttgttttgttatgtttgaacataaatggcaaagagtagacaattcaaaaggttcctactaatctactcttaaggtggcttctaccactcttcttcatttgtacctaaattgttgttgcagtgtacacaacacaaatacaagatgttaatgtttttacaatgttttgttatcactttcttcttatgtctttctctacccctttctttgaaacaggcttttctttctacagtgattcaatttgtaaagggcctttcccaatcttggctttctggttttggctttttgcttttctgctttctcatcattttgcttagcatttaataaaaggaaatttaagaataccttttatgtgaatttgtttgcaatccattattattattgttaagtacagtatatgtaaatgaatatctttagtgtaaatgaatcccatttccaatctaatgaaaattaatttgtaatattaactccaaaagtccaatatttaaccagtgttataaataccattcccatcagggttataaattttattttactgtcacatcatgttattaaataaaatgatatggtaaaataatccaagtttactgaatatttatataaaaatattttacacttataatatattaattaaattcaatagaaatttagtacagtgattattatatcagcactagttcaattgtataattgattcaattcaatagtccactcgagtctcaaaccaattgtccaaccacttgaacttgaacccagttttttataacactaattcaattacttgagacaaattttaaattgcattattacttattactaattttttcttatgacaaacgataaaatactttgcatttgtgatacaatgttatttttaactatttgtagtttttttaaaagagaaaaaaaaatttaaaaaaattacaaaatcattcaatcataactcaccttatatataataagtttgttcacttttaaacaattattttaaaataattaaaataataatttataattagataacattataaaatcaatacataaacattaaacacttttttaaactaaagatattgagaatgataaattaaaatagatgttttaaaaaaatcttaaaaacactctaaacattctcgtcaaagaaaaataccaaaaaaaagttcttgttaaaggaacgaacctataaacattctcatttaatatagttattataatttatatataaaaactgattatttaatgaatgtgacttagttgataatatattgagtttgtggagaagaatatatataaatttgacttttacataatacattattgaaaagaacatgataaacattaagtataattaagtcccatattaaaaattagtttcaatcgatctaaataatcgaaacttatgataatatcttatgatttcataaaaagttaaaaatcctaattattctatatatatatatatatatatataatataaagtgatttgttcacttatagagacctcaaatacacttataataataaatttgatttagacaataatgacaaagaaaaataaaatgaaatcacgtttagaattttgcaaccctccccaatacaagcacactaagaagacacttgatacaaaaaaaatcataaaaaatcatgtgggcattatgattttttggaaataattaaaatctttttagttgattatttatataaatttcttggaaataaaagagtgagtagtatttctatcaaaaactttaattatatatcacattaaataatctaataaaagagtaatgtatttttatttttatcaaaaataaagtttcccaactttagattccttgattgtaccaacgagtactagtgtcttccataaaataaaattaaaaaaaaaaaaaggagtaaggagtactagtgtcccagtttacattgaaaagtttattgagtgacgaggagtttgggttcaagtgtttctttaaagcatacaaaatgaaggaatttaaaaaaaaaaaaaatggagacccacatccctccttagaattagagataacaaaataagtttgactcaatagatgaaatcaaacaatctccaaataagactaaattaaattcttaaatttttagttaaaataaaatcagataaaattagtccaacaatataagcctagaaattatcatacctatttagcttgatattattttgaattaaatataattttggtttttctatttttaaaaatttgtaattttgatctttatattttaaaataaagaaatttagccattttatttttaaatttctatagtttaattttcctattttaaaataagtacatttaattttttttgttttataaaatctacaattttaatcttttcatcaaatttcaaaaatgttagtcaataaaaaatttaaataatgtgaatttagtaatatgacaccaaataatttattcaatctatatcatgatcatgattaatcatacattttgttcaatgagttaaactccatgttaatatcctcttgatttgaatagtttatgtgtaattgagtgagaaagtaaaatgattcatgttcgctagaattaggtaagtttacaataagaatttgtgtataaattgtacgttaatcatgacaggtgctattcaaagaaagcaacacttcacgactttttgacaaatgtatcaaaaacaaatttgaaaacatattgccttggtcaatgatgtaatattaaaaaaaaaaaaaaactcattctgttcaattggcggataatattctttgtacaacttttgataattaaaaactatatatggtggatgcatgtctctcatatctttagacgaactgctcttttggagcacttacctccaaaccaggcatgaaattcaacgaaattgttaacaaattcaaagtaatcactgttctgaccttcaccatggtgtcttttacccgttcatcttttattgccacttgctactgattattccacttcattgtgccaataaatttttgacctaatctgctagcacttttctatttgtcatgttacaattccagtttccttttaaatgtttacgtgtttaacaacaattgtgtttgttttttggggaaattccgtgtatagcaagcattaatgaatttggagtatttgaggttattaaataatatgatacgggtatgttgaagaaagagggatgtaattttcatcaaatgagaacattgagaagaaaattttgattaagaacttgtcactagaaaaaatatcaagtttttttatatgtataaaattaatgataataactctatttcaagactcgggatatgtctcccacctaatgaatttaatcaatttagctcaagaagcctagaatcattttgaagcctacgaagctatagatggatttgtgacatgacacagaaattgacccaaagccaaattatattctaaaaattgtaagacaattaaggacacagcatgagtatacatgtaattgaaaatttaaggaaaataaaccactcccgcacaaaagcttcaaaatcgtaatatctttatatgtgtcacatatttcaaaataaaataaaaatttgggagaaataaaattagtatattataaaagaactctggcctgcattatttttcttctttaaaaattacttaaagttcaaaataaatataatctctttatgtattttataagtatatatatatatatatatatatatatatacgtaattgtaattcctcaagtttttttaacaaattaagtccttttacttttaagaaattaagtaaatttattagtgttttaataaaaaattacaaaaattatcaaattctcattttttttattcaaaattcgaactaattgatttgattaaatagttcaaagttactattttattaagactcaaaccaaaacatcaaactgcattctaaataaataaataaaatatatatcagttttccccatttcaaattctaatctcacatcctacattttttataaaaaaatgattaaattttttactaaatttctaatgttttaaaatatttataactcaaatttatcaggaatctctaaatacttgaatagaaaaaaaaagcttttaaatattacaaaaactccaaattttcttaaaatcgaaaataaaagaatttaattaactaaaaaatttaaaggaactaaattaaattacacgtactccaaacttaaaaaaatataaaatataataaagcattcaaattttaaatgttgatattcatcatttgtttatgtcatgttcggcagtgatgtatcacgtggttgtcaaatgaaaattaaataaaaaaataaacacgtacaaatgtgtatcaaacatgtgtcatatctagtacgtgtccaacacaacactcgaacaatatatccatgcataatagcttgcatcatattcatagccatcgttgttgctagttgctaccataagtgattcgttagtgaagtcacttttttccataagaaatattgtcttgggggccttttgctttcatttttacattcaagtttcatctttcttctatgcatttttttattaattcttctatgcatgttttgttattatgtatcaaactcttcgaaattttgagagattgatttttaaaatattaaattaattactataatccaaacacaagttaaatgtcctaaaaaggcccaaaatatggtgtgtaaatattttgttagatttaactcttttgtgattaaatattatattttaataaataaaatgtaaatattattgttaggtaaaaagttaatagttaaaattacaataaaatgcatgtacattcataataaattctaaaagttactaaaaacttacagtgtgtttggaatcatgttaagcatcctggatttggactctcaacgcaatttatagttgcatttgtattgtcttggacgtaatttgcactaaacataagatcctagctaaatgggaaaccaaacacaaaataccaactaatataacttttgttccttttcaaagttcaaggtaacttaacaacttcatttgtcaagtatacccttatatttcacgtaatttttaattaacttatatataagcatttattgtagagtagaattgaaaaagaataaaataaaaaaatttcacaactattatatcataaataaataaaaatatatagttcttgatttttaaatagaaacattaaaagataaataaaaaaaatgaagtgaatatcattttatataaatgttcacatgtttgtttctgcattaaggaatcaattttaggtccataattattttaagacaacttttagtaactctggttagataaacaaaatttatatttaatttcactactaacttttaaaataaaaacgtttaaatataagttacgtcactttaaaattaatttctttcaaaattatttaattttccaatgtctcactcaaacacacactacttaaccgttaattttttcatgagtgttatagctgcacttttatcttcagtttaaggggctcaattcaatcacatctttctctactttctaaaacaatttccattcatcagaaaaaaagggtctcttcatcatcataaaaatcaaaccacactagacagaattgagagcgcatgatatgatctcgcagccagatatatatttgaccacaccaatttattaaaaaacaaaagcacaacacgaaatgaatgaatgaactcctccaacaaagtgagagggtggtgtaattattattcataccacctatgtggggatcaacacaggaccctcatacagggaaaggagcagcacgtaaaggcaaaagaaagtggtcgttagattatggagtcttagacatgcctcaatgatgatgctcttgctgcattgcatcactctctatgatattgtttgtctcccataatgagtgtgcaccccttttctacattgactagctttttccagcttaaattgcgcaagcaccacccttttgttggattattagatcgttggatatgttttatgcgggaaattaatatatcatataatcatatgtttatattatcctatatatagagtagtagacccttcgcttttgtgtaatataaaagggccatacccgcttgctgacttgcatgaccaggctagcattgcttagctgtaattacaaatgccatccttcaaattttcaatacacaaaatgacatcatttttggataccttaatgggtatgactcactaatgaagtgtgtttggtttcttttccaaaccaagttcaacggggttttcccactttccaagatgagaaaatagaagaatgtgtttggtttaacgttaagttgaacacacatatatttccatgcacgttttatgataagtaggaattcgaaacttttgattcaacgtcacatgcactaagtttttttagagagaatttaagttcaatttttatagaatatatcttatagagagaaacactactacacaatagggatttacagacggttcccaaaggccttcaaagacagttctgcaaccgtccttaatacgagcgtttttgaaagtggtcactttctaagacgggtggaagaccgtctttgatggtaattttttattttttttttaattttttttatgaggtttctaagacggttacctaaataaccgtctttgaaagctaccatttgaagacggtctttctaaccacccgtctttgaatctttctaaataaagttttttaattttcttatttaggtttctaagacgggttcagctggaaccgtcttagaaagctaccatttgaagacggtcattcttaacacccgtctttgaatctttttaaataaagttttttaattttcttttttaggtttctaagacgggttccgctggaaccgtctttgaaagctaccatttaaagacggtcattcttaacacccgtctttgaatctttttaaataaagttttttaattttttttatgaggtttctaagacgggttccgctggaaccgtctttgaaagacaccatttgaagacgatcattcttaacacccgtctttgaatctttttaaataaagttttttaattttcttttttaggtttctaagacgggttccggttgaaccgtctttgaaagctaccatttaaagacggtcattcttaacacccgtctttgaatctttttattttcgttatttttattttttttttgttgaagtttctaagacgggttcaacgggaaccgtcttagattattaattttttggttttttattatttatttttttacaaggtttgtattcataactctctaacaattgccactaaatcgtttaattgttaaatgccgtgaaaggaatcattaatgcgaaagctaataaatgaataaaaaataacaattgcttgatattaatttgataataacatgtaatatttgcaaaattttacaggcaacccccataatgcatattgtggttccatataccctctgcaaaacaaaattaacagattccaattgatgatcaagaaagcatattaaattatatatgttgtttggtttaaattgccatccagtaacacattagtagcttcattgtacaacatgcaggtggcatagtgagatattttcttttgtatcctacacaagatacataagcaagtcatgctcagtttggtacctatgaagaaaaataaaattaaagtaagtttccataacaagcataataaaatgataatatagattgttaaaagggacatacgtgttaaagatacgatgtgtcagaaaaaggctcttcctaactaatacagaagaattcgcactctgaacaacaagtgcaagagatgcagctgtgaaggagaattgtatatttatagattagcaattaccttgagtaatgacataactgataattaattgtcaatagtttggactcttcaacattaaaggggacaagtagaaatgcatatacctgaccaagagatgttagaaatgcatataccctctggcttctatctggtgctttttccaattaaagatgtgtcatctttcattttaatctcctctttgacaatagaatcatagatctcttctagtagctctttaggagcacattcatcagcatcagcatcatgcgaacaaaatctgagttggacatcttgggccacaccattgggttatcagcattagtatttaacataataacagcatgagctagaacatgagttgtatctgcacagtatctgtcatagacaacatgcacaaagacacttctattagtacaaaagatataaattagaaccagtacacgtacaaggtatcatgcccacgaaatataaagtataagtagacattatgacatggcaatcaactatgatttgacaccttttaaaacaccctgagacatcttaatcttagtccacatgaagcagaataattaggactgtcagttttcctttcttcccactaggttgaaggaaataaataactgacttgcacaatggttaaacaaatctgttgatagagcataaaattcttaaaagcaagaatgataatgcatagtttttaggcacataatcatctatcaaaattcagtattaaaggagattccaatacagatgcacaaatgaataagaatacatcgcattatccaatcagagttcaacatacaggcaaccaatcgccactgagataaggggaaatggagacaagttgcatgtacaaaaaacccattacctctctgcaaacttttccatgattcggtatatcttttgagcttccccaggaagtgggaaccctttaagaaactccctgattgcagtatcaaatttaaatccagaaaatttcatggaatctacataagcatgcatcacagcaaggggaaattcttcatgttgacctaaatagtcaccaattgtggcctgaaagcgagcaacagttatatattccatagcaaacttggatgcaatggtagattaaaaattaaattatactagagaaaagtcacaaccttgtccaaattacaagtgtttttcaaaaattgagcaactgaggcaggtgtgttttccaccaacttatttcatattagatattccacccccttcattggttttctgttgaactaaaagattattaaaaccataagtcagcccccaaccatagcttcatcattatgcaacaggaggttaagagttaagacaaatttcagttccctagtaaaaaatagtaaagaaaacatgatcaatacctcagcaatggctgcctccaatgtggatttatgttccctagattttatttcagaagaatctccagctgaaatcccttcttgctgattattctttaacttttccaactccctatctgattgctcccaatcaactagtgctttaagcacactcacaagaccctaggaaggttaaaagaaaatgggatcattcggcaactttataaaacaaaattcattcaattaattattgatttccaataaaagggcaacaagtaaacctacttgaagtgatgagcctttaattgaagctgtttgagaaagagccgctgaatttggatcggtattttgagttccttcatctatttttgatagagtagtaacctacaaattgaattggaaaataacaggcattatgttagacgtcaaataaaggaggtatatgcaacaatgacccatgctaggtttaggaagaagcaggggcaagtagtaaaacctgtaactgactgatgtcagttacagctgaatgaaaaatagctagggtgacctgtaattggctgttagtgattacagttgaagttagttagctttaaatagtgattagggaggctaggtgaacttcctagagttgttactagtattcatattcaataaacagagaattattcttattctccatcactggtattcttattcctatcttcaatggtgaggacgctttcggatggacgaataaggtagagaggtattttgaagtgaaaggagtaggagaggaggagaggattcaagcagccatggttgttatcgaaggaaaagcattaaattggttccagtggtgggaattctgttcaaaacacccaaactggacagatttcaaaagtgcagtggttcaacggtttcagccttcaatgaaccaaagtccatatgagctattgttgagcttaaaacagaataattcagtggaagagtatagggagaggtttgagctgtgtaacgcctctcgttactctctcgtgctcggttgattttagataaaattacgtgtccactttgtattaaaattaaattagtataaattttttcacgaaaattcgtttcgctttgcttgctaattttataattcgtaagtaacataaacgattatcctcaccagatttatttataatgagaagcataactaaatatagcagtctgtgtacagttatccaaaataaaatacaaatacagtacagtacgactccataattcacaaaaatggcaacatcaaaccagatcatccactcatcaagtcaaaacacagcaagcaagtcatccaagcttctccatatctcagctttcactgttcctctgctcacccaaataaattggggtcatcacaggtgtcaaaccacagacacaactcgggtaagtattttaataaacataattagataatcgataggaaacagaatagtatatcagatacataacagatttaaattaaacagcggatatatgaggtatcataaataacatttatagaacaaatatatgatgaatgatgcatggtttcttatttaaatgatgcatgactgagatctcagcttctcataaaatcaacatcagtggccacagtcagatagccccaatcactggtccagaacttgcatgatcagtcaggatgtcacagtggtgcacaggaaagtcaccactctacatgtgatcatcatgggtggcgtgagttccccactgccgaagcatcccccagctcagactctcacagtctgaatgctcatactcagttcctctaactatctgacacacaactccacggtttaacccccgcaaggcatcaacttccacggattaacccccgtcaggcatatgtgtatgaaatgcatgaataatttattttatcaagtcttgtggcagatgtttttagaacaacacataaaactttatttccaccatcatagaattttacaccacagtctcatcataccgccatagctcttagaataaataatcaccaattattccatcattaacataacacaattcttgcttcgtttctcaacatcaaaatcataaaccaccaatcaacacttcatatttacacataaaagatcacataacatattttattttttgaaaccttttatcaaatacttggtgtgctttatggaaacactcaacataacaaaataacatacaacacattacatacagcaacatacagcaaactcatattcagcaacataatgatttacagccacattaaattatccatcacaacaagatacagcaacaacaacataataaactatacaacaacataatattttcagcgacattaaatacagcaacataacctacaactttatggaattctaaatacaacaatatacaacggcatgtaataacataatatcatacagcagttattaactacagcaacgtaataaaatttataacagcaacacactaaaatatgcaacaacctatgacttacatcaaccttcaacttaattaaatacagctacagcatacaatatcattcgaccaatttacagcaacagcaacttaaatacagctatatagaatatcacacaaaattattaattgacagcaactaaataacttaacctacagaaatctttttttattacagccatactcaaccaaaataagttaacatacagcaatcatttaaatttaaaatacagctaagaaattttatggttacaaagtaggattcatttttggacagccacttaattaagttaagttaattaaaatgtttatggttaaatccatatactagtctatatattcttaagttcattgagggctttcatcaaacacatggtatacctcacttaaagtttcataaaacaagcaagaacatggctttaatcaaagagaattggatcctaatcaactatctaattcatgttcatcaaaatactcccataccttgattaaaatttcagcagtttcacttccaattttccttgtttcctacacgtgagtttcttgagaagtggtcttatatttggcttttattttggatgaagattgagtgaaaagaattggctgaagataaactgttttggtcgtgcaaatccaagaagcttggtgccttgctcctttgtttttagctttatgtgtttgagaaagtaattgaaaaggagatggctggagttttgttaaggtgcagtccgtgaacttccatgcttttatatagactactttctttgattttaaataaaaatatcatagaattcatgatgcttgctttttagttgtatttttcctattggctaaagtcttcctaccttacatgtgtctcttagtcatgatagttccatatttttccacttccttctagcattggcacgttgaattgcttgttcttggtgccttttatttagtccaaatccgttaattgcttaggtctaggtgtagagatttttgtttcttaaatcatgattaagtgacttccaaatggtccaattagattatgtcttgcttgtaaccgtccaagtgtccctaatcttgaactttctcaagctttcttctcctttgcttgaagtgcacggtcttctggaggtttagaagccaatcatatacaatttttttgcttaaaaccgtggaatagttttagtcttgtttctaaaaattctgtcaaaacccgtattacaaaaatttttattccgaactcattaaccgttggatctttttaaaattttaatggtataatcctaacttacatgtctagcttttgaccgttgggatctttgaaataatgtttagagcttcccacgtgttcttcctaaggaaacaagataaaaatctacttaaattaaatttttaccatacaagtggaccaatggcatgtttccaagcctcttaactatccatatgtgtgttcttgaagtttcttgaagtttttctccattgatcttgtatcatacggtcaaggcttagtttagaaattcatattaatccaattttcccataatagctaaattcttattggtccatattatctttaattattaaaatttactaaactaacttagttaagaatccttttcctcccacaattaagagaaaattccatagattatactcatacccttctcataattttctgatacctagggtagtctgaattaagctctttttaatctaatttccaaaatttgtagaaattctatcctggggtttttcgcctccaacctgactgattcatgattatctaaaagtattttatccaatagtgaggttcctacaaatttctaaggttatctggtcagttttgacttcaagggcattttggtcatttatcaccttagggtataatggtaattacctaatttgttcaaggacctttttgtaattttctcccaaaaatatctttatcaaaatatctaggatatattggtccttttcaaaaatgtctaggggtataactgtcattttccatcctaggacataatagtcatttttgaaattgtccaaggatattttggtaatttctcccagtaaatatcttaccaaaatatctaaggatatattagtcatttccagaattattcagggcaaaattgtcttttttaatcctaagggcataaccgtcatttttacaaatgttcaagggtattttggtaatttctccgagggatacctgggtccttaccagaattgttcagggtaaaattgtcattttaatcttaggggtatagatgtcatttctgaaattgtttagggcgttcttgtcattttgccctaattttctaccgcttttcattttattcttaataattgtctgtaattccctaaattttggggtgttacaagctgtacgcagggcctttgaaaggaactgaaccataatacttgaacggaattattttaaatggcctcaaggaagtaattagagcagagctaaaattgcatccagttaattcacttccagaattaatggatttggctcaaagaattgatgagaagaatgagttgatagagagaggaagggggggacatcaaatagggatgatggcagcaagaacttacaatgcaaatagaacagtaacatgggagcctggaattaaaagctctcagacaaaggaagtagttttagtgggggattccagcagtgtgaaatcaaacggatcatacaggggaagaccttttagaagactatctaatgctgatttccaagagaaagcagagaaaggattatgttatagatgtgatgggaagtttcaactaggccatgtatgtccaaacaagcatttgcaaaatatggctgattatgacagcagaacaagacgagaatgaggacatggaagagatagtagatgaggaagatgaaaacagtttcagaaaatgcagttatctttgtaaaatatggctggattgacatcaaaaaggtcaataaggctgattggttcaccacaagctattccacaccatctatcagttaattgcaaggatcttatgtagtgcatgctataaaaaaccaaaagtttaaagaaagctttaaatttttatcatgtttatgagaccttaaagtttgtgcatgtcaagtcaaacaatgttgctataattaatgcaaaaggatataagtacatgtcaagtttgtgcatgaggcaataattaattttttaatcaaccaggaagaacattataccgaagaacactaagtttttggttgacaggaaattcttatccatccagtggtctaagaactttcaatggaaataagatgcctatttcaccttggaaacaaaatagtgtaaaagcaaatgagacatcaaattaacattaagaagcttctgcaaaatctacagaatgacatacatactttgggactctccctgaatcgcaataacagcaccaaaaatattccagctgcatactgccaataaagaatatcaatatcacaatttacacatagatactttacgcaaagaaaggtaatgcagttcaataaaacctgaaatatgacaggggattgtgaaactgaagctcggttcaatgcatatgaaagaaatgtcttcactgaatcaataaaatggtagttctttgtaaatgagtggctgactccctccaactacccctgaaaaataacataacaaccatggctgaacagtcaaaatctaatggacaaaagaatcttcgagttctgtgaaaacatatgccatggtagcagtaattatttatgtatttatgatcattctggataaactcaccacattaaactgagactgctcaaatgtagatgttgcactatgatgctcctgaaacatctccaaacatttgaaggattatagaatgacatatagcagagtgaatctaagctgatcaaacattagtttcaaacataggcatggcaacgaaacccgagcccgtgggtacctgtcaaaacccgccccgattttaacggggaaaaaccgaatttgttattgataatacccgccccgcccccgccccgcaacaaaaattcggggacaggggcgggtttggtattgatgatacccaccccgcccccgcccagcccccgcccccgccataattaaattacaaatttacccttatatataagaataaaatcccgaaaccctaactctccccctcatttctcattttcgacgacgctgaaccttggccaacgattttctgaattaattccattttggaagctttgttgttgcaatggacctctactctttgttgtgttttattttaattttggaacaatatatatttaaatgatattatattttgggagaaattaaatatgtaggtccataatggttttaattaaattgattgattttgtttaataatttttaaattatgatctcatattctgaatgtgggtttgttattaatttttttgttacctagtcaactttcttttcgttttttcaaaagaaaaaccacattattttttttatttttttaattaatagtaggggtggggcgggggcggggcggggaaaacccgacctcggtggggacggggatgggtctgaattttaaaacccgacggggaatggaggtggggacgggggcggattttaaaggcgggggcggggacgggaaatacaatacccgcacccgccccgccccattgtcatgtctattcaaacacaacagcctacctattctagggcagtagctacaccagtttttctgccttttcttagtgacagaaacctttgacaaagctgcaagaatatcatgtttggcaaccattagagaaagtttattttccagcttctaacactgttggctccaaaacagattactataggtgtcttttaaaagctttggtgcatcttagtagtctattcaaattgttaaatgcattatatatctatttatttcatgctacttgaatggatcattatcataggcagtatgattagcatccatactgttgaaagcaagaggaattgacatggaaaattagaaataatttgtgcttgataatgcaccaggtcataaataaggctagccttgtcaaagcgttttcgtgcttcatgcattaagagaggatcccttaggacaaaaagtcagtgcataaattgctcacagcacctaagtgcattaattaagtttctttgcatagggaccccaatcatgtggggattccagcttgacacattacatacaatatatggcattaagacaattgtgtacataaagttaaatgacttgaagtagatatttaaccttagatgaatgcatctcgagtgttccttttaactctggaataacatgagtttgaccatatgttgtttgtggcttatgttacctgaggaccaatgaattatgagtctaaaccatttcaatagtatagtcatctgaattcaaatgataaacattaacacaatttcctggataatatcctatgatttaaacaatatatagctgtgtgcaaatataaattgaataaaacaagaatatgttaaactttaaccatgccttagctgaagccaaatatttttgcatatcataagtaaatgtgtttacctccaggccagtcaatgaaaaggaaatgaaatgacctcatgcaaataattatgaccaacaactcaagcaactgtgtcatacaaagttgcacaaggttctcccaaagtggtgtgaacctaccttgtttgtagctatcacaatgtccgcctaaacaatgacctgaaaagtagttacatttgccggaaaaaaaaaaaaaaaaccacatacatgttggcctatgttgaagaggaaatcaataaataattatataaaccaggcactttgctcgtattccattaaaggttttcaacttgggatatatgtgtacaatatatgaagatcattgcaaaggcgagctatagttcaacagcattccccgtacgacatacaaaacagcctacattggtatttttttttattctaacaaaaatgatgcccattttctcctcaaagtgctaatggtctccatgggtaacgttgtgccatcagtaaaccactgcaacaataagtcattaaaccaaaattattcgtttacaagatcctgtatgcaaccatttatcaaattaaagtaaacattaatgcgtgttcaactagttctaccttggtccattcattcttcaaacccccactcactatgttccacatccagtgcattacgtaatatccacattcaaagcctccatcttgcacatggctctaaatattggtacattaaaaggtaaaagtgacatttggaaatgaagtaggacaacacagtatgcatgaaagattttgtaattgtctaaccttgacttcaatccaggttggtgcagatgcattgcatttaccatcgacacccgttttgaaacccttaagtacactgaccggaaatgcaacatacatgtaggttaacggttgaattttaggttgtaaagacaacttccgacagatctgaaaaatattaaatttttgtacaacttacttgttaagaacagctttgatgtgaatatctggcttcttccgcaatgaacaaaaccacacaactgtatgactctttggacaaagaacaaaaagctaccaatgtgcgctgcattttaagatggatattagcaaccaaaaataaaaacactacagttatcctaaaaaatgtcattagtttcatacttattgaaataagctcctaggtacatctctctttgtgatttgtttacccataattgaatgtattgttgacattctaaccgtctgtcctttgcattaattatcatttgaggctccaggaacccatacactgagctataacccaacattgtactatgttgatccataaacctattattcatatgtgaagttaaattcaaattgttaaacatacatactgtaacaattaaatataggtaggatatcaaatgtagtgtgtttgggttgttacttacatagtccacagctgtagcacagtaatgttcaaatacttgtcacctgatatgatttcattaatatctgaatgtgtgatgaagaatgttgtttcaacattagcaatgccaaacttgaatgcttcccatttcaactgaataggcctatggtaaacatgatagatgttcttcatcacttcatccaaaggatcaactgtttccactttttttgactcatcatttgcaaccgaaatgttttctggactaacatgtgcagcctatgtatttaacacaaataacaaataaccaagtgttagttaatgtattgagaaaaatcaaacgaatggaataattgtaaggcaacatgtttataccttctctgatactgctttcaccaaacatgtgggccaagcaacaaatgtgtgcagggtatctctaacatacttaatctctgacgttggatatggaacaagtgcgtccccatcataaatagtgtcaacactaacccgtactacatcatctccatagtcaacattgtgaattgtcgacgttccatcttgtgttttgtggttaatgctgatttgaatgacctccatcttgtgttaaccgaagacagtatttttttcttggccttatcagcttctgggatatcaaatttttcctatagtagtaagcaaaaatatgatactttccaataacgaaagcataacatagaaatggaatttataataaacattgagctagggaatataccaaaatgtcttcccaaattaaatccttcaacgtttcagggacatcattccaagaagaatggattatggggattttgtctcttgccacaaccccaagatagctgtggaatttttctttgtttttgccaaatgctcttcccgttgaagggttaacattcactactggccttggctgaccgaggtctctacgagtcaagcttcttagacgggtcgattgtctagttttggtagacgtcacgtgcgaatcttgctgttgtgaattgggaggggacaatgggggtgtcgccatgaatctgcaaggaaaaaaaaaaggaaatcacataagtcatgtacataacaaaacactttcataagctgtaattggtaaaggtaaggataaggttttcaaaaatatacatatatacaaaatacattactttgaaacaaaacaattacgatttgatgttctcccataaaccttcatcatgatctattcgatttgcatgttcagcatcaacgtcgttgtcttgaacaacggaggggatgcgtgatgagaaaggtggcatttcacaaatatcaagtgacgcatcatcaccaaagtgcaaactactaaacgatgttcttccttgtaaaacaatcgaaaatcgagtgttacacgggtccttgatgtaaaacacctgttttgcttgctctgccataatgaaaggctcatccttgtaaccgactttatcaagttcaaccaaagtgaatccaagatggtcttgatggacacctgtgttaccgtttacccacttacacttgaataccggtactctaaaggcactatagtcaagctcccagatttcttctattaccccaaagtatggcattgatgcttgaatagggttgttatcagatgcaccacaaaagtgtaacgagttagcgtcgattgtaacgccactgttttgcactggacttttatcatcttgcgactttgtgtaaaaagaaaagttgttgatatcatatcccttccatgtgggtacattgaagtttgggccaactgctaatagtctcaatgttgaggaagcattgtcatcactcaatatttgccccttaaaccaactaatgaaagttctgttatgttcttgcaagaccttcattatgttcattctagggtgagtgtttatcaaatgttgtttgtgagcttctatgtacggcattacctcagtcgtgttattcaaaacatacaaatgaggttgttcaagctgttcccgactcatagttacaacgttgaatcctcgtgtaccctttccttctcttgactgggcatgatgactttcaggtataccaacagatttaactgaacccatgtactcagaacaaaactcaatgcattcttcggcaacgtacctttctacaatggaagcttctggtcggtattgatttttagtataaccttttaggactttcatgtaccgctcaatcggatacatccagcgtaagaacaccggaccacacaacctgatttccctcacaagatgaacaattaagtggaccatgatgtcaaaaaatgagggagggaaaaacatttccaattgacaaaggacaatagctgcctcattctccaaatcatccaactgtgtggggtcaattacctttttacataaagcattaaacacgaagcacaggcgagtaatggcaaccctaactttgtctggcaatataccccgaatcgcaactggcaataattgttgcattaagacatgacaatcatgagacttcaaaccaaccaattttaggtcatttacggaaacaaggctcttgaaatttgaagagtatccttgtgggatcttcaaactacgcagacattgacaaaaagcttttttctctttggtggacaaagtgtgacttgctgggggcaaataagattgtctacctttactaattggatgcaactgttgtcgtatacccatttcaacaagatcctggtgacattttaaattatcctttgtcttgcctttaatattaagtagggtgccaattatactatcgcaaacatttttctcaacatgcatcacgtctatacagtgtctcacatcaagatcggaccagtaaggaagataaaaaaatattgattttttcttccaaatgtttttttcactaccaactactttcttctgggtctttccgtacacggtgacaatgtccttaacacagtccagaacttcatggccagttaatggtgtaggtgcagtttctgtctcttgacttccataaaaagtttttttcaaccgcctatatgggtgataaagtttgaggaatcttcgatgtctagtgtaaactgtcttcttgccatgcttgagttggatgaaagatgtatctttttgacaaataggacatgcataatgacctttgacactatacccactcagatttccgtatgctggaaagtcattaatggtacaaaagatcattgcacgcaacgtaaaggtttcctttagatttccatcaaagacatctaccccgtcaacccacaatttattcaaatcttcgattagtggcgctagatatacatcaatatcatttccgggctgcgttggaccggatatcatcatacacaacataatgtatttccgctttatgcacaaccaaggagggaggttgtaaatcatcaataacaccggccaagaactatgattagttgcaaggttaccaaaaggattcattccatctgatgcaagaccaagccttaggttccttgggtcgttcccaaatattggatacttctaatcaatttttgcccattgcggagaatctgccggatggcggaggaatccatcactttgccttagatgtgcatgccaagtaaggtttttggcatcatcggcgtttgcaaacaaccgcttaaatcgaggaataattggaagataccaacaaacttttgctggacgagtagtgtatccggctgattcatcccgacattcatcttcgttgactttgtatcgtgataccccacatgtcggacaatttagcatatctgcaaggtcatttcggtatagtacacaatcgttaggacaagcatgtattttctggtactgcatacccataggacataaaattttcttcgcctcataatgattttttggcaaagtgttgtcttcaggaagcattttcttcaacaaaactagcaattctgtgaagctcttatcactccacccaaatctagccgttaggttaaccaaagctaacaccgctgacaatcgtgtgtaggatgtgcactcagaatacaaagggatctctgaatccgtttgtaatttctcataagtaggtgcatgtgcttgtcgaaaattcgcttctccaatatcgcgtagcatgtcttcaatatgaaatgttgtgtctacatcaaacggcgcagtggtatgagatgttggcatatccggcaattccccatgccagatccattttgtgtaactcggaatgattccgtgacaaattaggtgtgatctgatttcatctagtggttgtcgccacccatttccacatttaacacaaggacaaaaatagtttccatgctcaggagttgcattagatgtggcaaattggaggaattgttcaaccccattttcatattgctgactaatacgcggtgatttcatccaattacgatccatggttttacaaattagctggcatgataatattgtacaaattgttatatgcatgagaatgtaaatgtaggcatttaataaggtgtggccctatcccattcaggaagtgatatattgtatacatgatgtgtaaatacaagttaagtttggtttgtttaatttaatgaaatttcggcagcatttcgcattggtctccaagtacacgaaaggaaagaggtgatatgaatcacccctttctagtatgcactcggagatcaaagcgaaatgcaaccgaaatttcattaaattaaacaaaccaaacttaacttgtatttactatttacacatcatgtatacaatatatcacttcccaaactgtccaaacggacaattcaagattcaattcaacgagtaatccaaactatccgtattactcattgcattgatacttgaacgggaaactaaggttaactatgaatgcaatgcatggtgtgccaaagaaaatagtcatatatgaacaacggaagtgttaaccacaaaagataggaaaaaacataacatacctgaaaggatgctcaatatcaatagcaacacaatccagcgaccgtgaccgtaccaatgactttttgtttcgtgaaccaataatcactcattcaaaaacaaccacctaaaacaacaaccaagaaatacttaataatatgtcagtgtatcattggttatacaattattgcattgtatacaagaattaacatctcctgcaaaatacatataattcagtatgctactatatcattggttatagaaaatgaatttgtcacaccttaataattactatatacaccgacatacaaatacagggcagatataatgcaactcaatctgtcaatttgtctaactaaatcaaaaaggtctgttgaatttcagaagttgaagcctatggttgaaaatgagggtcgatggcaaattaaaaggctaagatcggacaatgagactgactactctcaacaccgaggctttcgctcgggccgtttctgcggtttctaagttcgggaagaaaggcggtgcgcagttgaatgtgattcctggacgctggctcacaacgccttttaatctcaccagccatatgactctttctagctgaagatgctgttatacttggcattgatgtcagttttctatctttccttttttttatctctgtttattttgtagtgtgtatgtttttataattatttataattataattataattataatcatgaaggataatgaggaaagttgttaaggtggtttggacagtataaagaagaaaaactagtgaagagagtatttgtatgatttgtagtcctgtgaaactagagagagagagacagagagagattaagtagaacattaggacaagttgttcagaggatctcatagtaaataatttctctgaaaatttggtctttaactgagtagaatagcattgtgtggtctatccagctgattttacctagtgggatatggttattctttcttttgtaattttagttgatgttgttatcatgaaggatatggttgttatttctttagtaacaattttgcggctcagtggaaagatgttacattttcctttcatgatatgtgatggagtaattgaaatggaaacgaggcctccaagagagaaatcatttttagttgaagaactaaaaatacagtgataaatacttctggactgtttcagttttgaatatcatacaaaacagtcttacatcttattgcttgcttgtggaacgaactctcacgcttaaatggaatggaacaaatctgttcatgggctttggttgtctgttccgtgtgtcaaaagcagtcatatgctacttgcctgctgatcaaaaaaaaatatactacttgcctttggataatttgagaaactaagaggggggaaaccacccatagcaactaataaaatgtctttggataatacaataattactgttatgatatgttgaagcatgcctacagtagttggtctgaagtagtttcattcacatattacctttattataccatatatatctttctatgttggaattgtcatttcagagttggagacatagtgccactaacctgtttaatgtttggaaaggtaaatgaatgttgtatttgtgagagtagaactgcagtatcaattattgcatttcttcaaggctagttgattgtagtttggcactttggctattgtgctgtagttgtttggcacaatttttctttttaagaggatctttgactttattctcgcttagatgtaaaaataggagaacatactataccacaagcctcacattttaaataccttgggtccatcatacaaaatgatggggagatacagggtgatatcaaccacaagatccaagtagggtggatggaatgaaggaatgctctgggtgtgatatgtgatagaaaagtaccactcaagcttaaatggagaatgttacaatgattgagtagttacacaagacaagataggattaagaatacaatcattagaaagaaagctcatgtacctcgtattaaagaaaaaaaatggtagaataacctgtttagatggtttaagcatgcatggagaagacttgaaggagcaccggtgaggaacatagatttagaggtaattggtttttgttgttgttacgatctatgtagctaaccctacctagtggaaaaaaacctaatttgttgctgtattgctaaaaagaggatatcggctacacagtcactacaaagaggggaggggaccaccaacaaacagcaactattattaggttgaacaggatttgtggttacacaagacaagatgggattaagaatacaatcattagaaagaaaactcatatacctcctatgatagaagaaaatggtaaaattttgtcttagatggtttaagcgtgcatggagaaaacttgaaggagcaccaatgatgaacaatgattgagtggttacaaaagcttcaaaacaaacactattgctgtataataacagacacagggccaaaaactgtcagctacacatccactgccaagaggggaggaaaccaccaacaaacagcaactaaacaatagcaactaaccagcaatttaataagcatgtgtccaggcaaacaaggggaccaggggcacaatacatgtagaaaatcactccagcagctcaataataatagcaaccagcccttatgttcaggagacaggaccacctgcaccatcacttgtagttataagacttaggaacaaaggaaatagctttggcaggaacagaggaaagtaaaaacattaatgaagaatgaaccgatgaatgagaaatgctataatgtgaatagagggcataaagggtctaacggtaggcaaaaaaccagcccattccctccctattctgctattttttggataaataaaatgttatcttagggttgaaaaaagtcaggtcgcacatgacccactgtacaaattgtgtgacccgctttgccagccgtgatgtctacaaattgtgattcacctcgattacaagcggttcatggccaaaaatgcaacacaccacgattcatatcaacagcaacttgaattgtaacgtatcatacaattcatatcacaaatcatacgatacttactaccatgatgggtaaatatttcaatttaatacaagagttgtgatcaagcttggatcatgaagaataaaaaataattctttaaactgctagtgagagaccaatatggtaggattaacgaagggcaccaaggactgagttcaaggtgatcaaattgattctatgaaataatagctgggtagggctgctgttcagactatatgttgttgtacaaaatgacaattcctaattgagctttaaagagtagaatattgcttgatttatctttttgacaaatttattgtacctagatgataacaaactttgatgttgtgcaaagtcaattttatggcttgctgaatttctttctaccagccacatttttgtataatgtataacggttggaaacatgagtatccatcgtaggatattctggaagctaatgtacatctacattgcgcacttggcattggccagcacaaacggagtttttcactgagggacaaaacaactagcacgcaccatccttggtgagaaaaggaagacaatttccaacaagttatctggatcaggtatgcttctactatatttttctttctgggaatttcttctaatgatcttgacttatattgtattatggctacaaaaaatgaatggttctctggtattttacttttgatatggttttattttaattttcagacacagtcttcaaaatcgttctctctatatcagagaaacataaacttctctataaccttatttttttcctcttaaggatcatctctactgaggaataaaacctcatgtattgcaaaagcaatggaacctcaatcacaccaccaaatcaatgtcctttttttttctttatgcaacacctggccatatcatccctatggtagacacagcaagagtatttgccaagcatactgttaccattataactacccctgctaatgctttaacattccaaaaggccaagacagtgacttcatttgtggatacgacatcagaagtcaggtggttccattcccttcagcccaactttgtctccctgatgggattgaaaacaccaaagataccactaccccagaaaggataacaaaaatcagtcatggaacatcaatgctcaaagatcaattagagcttctgtttcaagacctaaaaccagattctatagtgactgatttttgttatccttggacagtggagtcccctgcaaaactaagcattccaaggattttcttttacaaaaatgttgtgttaataattctatccggaagcgtagacctcaagaaagctttgcctctgataccaacaagtttatgattcctgatttgcctcaaggaatagagatgacccctctgcaggtagcagaatgggaaaggactaagaatgaaaccacaggctattttgatgcaatgttcaaatcaaacagtagaagttatggggcactgtataatagttttcaactcgaaagtcattatgagaaacttcataagagtacattggggaccaaatcttggaatattggaccagtttcagcctgggttaacaaggatggtgaagaaaaggccaataggggacacatgaaagaccttgcagaaaagacagaatggctaagttgccttaactctaagcaaaatgaggttgtactttatgtaactttttgaaggcttgtctggctccctggggctcaacttgttgaactggcccatgggcttgaacattcgggtcatagtttcatcttggtcataagggaaatggatgaaaatgagaatggagacagttttctgcgacagtgtgagcagaagatgaaagaaagcaagaagggttatatcatatggaactgggcacaacagcttctcatattagaccaccctgccataggaggcattgtgactcactgtggttggaattccattcttcaaattgtgagttccagtttgccaatgatcgtgtggccagtgtttgctgagcaattttaaaatgagaagttggtagttaatgtgttcaatattggatgagccaagagatagtgaaggctgtggtgattttgatgggaagtagccaagagagcagagaaatgaggaagagagcaagataacttggtgatgctgccaagaggactataaaggtggatggacagtcttacaacaacttgattcagttgatagatgagcttaaatcattgaacatatctaaagcacgtagcagattttacataattgaaatggagcattaatgtacttgctctcggaggtgcagctagatagctggtgatttatattacatgaatgtagctagttacgtgagttcaatgcatagtgccttagtgatacacatactactttaactaaatctttctctcatcagtacatagaaaaaagaaaaagaaaaaatgaaaacaagggggaaagaacagttaatttcttcagtggcaaacacatatttccgtggaaagcctattttttctaaaagttgcagcttatggatttttatgaatagatagacatctatcttatgcgtgttgtatcatgttatatatttttagaattatgacatcactatgttggataatatcctatgaatgcatcataaaggttgctttgaatcttttatgggttttgcatagtaacctgctctatcactcaatgattcatcatacatagtcaatccctttttggaatttcacaaggttaaaaagaagtattagactgcatttaaaaacatgattttcatccaattgttagttgttaatgcattttaacgaaagttccgtgaagcaaaataactatttttcccaaaaggaaattaaacaataagaaacattcaaattgcagttgcttcagcaacaacaatcaatgagaaagatcactggtaccgattgggggttaaggctgttggccaaggcaatgctggtattgtagagtatgtgtaccaataagggtcaacttgaaattagcagaccaatatctgcctattaataggaaaaggatttcagaagaaaagttagccattggggctttgtatatcctgaaccagaatgagtggttttgtggaaggttcactcaggttatggtttcattggggtacatgcacagtcatattaatcaatacccttgttatataacattctcaacaaagcaaacttacagtatttttggtctatttacatgatataattattgtaggtgataatcagttaatgaccttcaaaaccaaattctaatggataagttaggtacttagtttgtcaagaagctgaagtacatttttgggatagaagttgcctactcttaactaaggtatgtttaattctcaaacgaaatatgtggttgatctccttaaatcgactcattgttactacttgtgttgtaacatgtgcttgaccatgtgtacagggcccttaaccagctaaaatgctcctaaagaaagacacaacggataaatgtccctggactctagcatatgttggtgaggttctgaagctttccaagcttccctgggattgaacctaatagttgattctgtgccaaccccaatatctccaacctctcacagtcactcatctcagcaagtattcaccctgaaagaacatttagacctgcccttataaatctaagctgcttcaactatcctattgatgatggaattattccagttaaataattgctatatatgagcagctcctctagtgataccaaatcccaaagtacaatatatgacttcaccatgcatgtaattttcacataggtaaagctttctaattgttgttattttccaaatacgggtcagaaggggtccatgaagcctatttgtgcaaaggtccaaaacctccaaaccacgacagtcaacaaaaccatcaagaatggggccagagatgaaatttgatgacaaattcaactgaagaagctttggaagattacagatgccaggagccaaagtaccagacagattgaattcactaagtttgacaaaagttaggactgaacttgtgcaatacacaccagtccaattgcaatacacaccagtccaatgccatcatttgtctcttagacaaacgattttcttatcaggggttggctttatttgggcaagaagaacacaacagttgaaatgattaaggtaacaaaaagagacaataagggaaaggtttgacagaagcaagtgtgaacatgggacaattgggaggaggttcaacacaaaacagaacatgacataatagaaaaaaagaaaattaacactagtaccgtgtgtgaaaggaagagcaaaaacaaaaggcttggtggtgagaacaagtgaatgaagcagcagaagccaatttgctcagtttgttaacaccccatttggttacaaagaaaaataaatagaccgaaaaaattaatcaatacaaagggtttctattccatgcattttaaggctcaagttcacttacataatgctacataccaaaatttgcccatatcgaatttgggatgtaagagatatatctacaacgacatcagagggtttcaaaccaattcacgtactctacatttataatagtgatagtttcaagacagcatgggatccacattattttccaaacaaatttcagaagttagtttcattcttgtcactttatttatacacttggctatggtcaacagctacggcaacactatagttttacatatcttaaaggtacaaagaaacatgacagttatcactaaccacaggtttaagtttcttactccttaaaattagtcaaacatacacatcatgcagaaaaattctacagctacaccacttcattatatacagccataatatttgaaaaatattttatggaactataaaaattgtggggctaattgcatttggaaagaagacatctggaatctggatgtagatcagtgtaattaaaaggacaaggtctggttcttaaaatacatgtttacgcgaatcgtttgaagacagggtagaatcattagtaaatcctaccaagtaaaaaatttggtataccaagctacttatcttagcttccttaagccacttttacaagctttaaaatataggttttcatgctaccattgttacagaagactacataaagtgtgcattcatgtactttagtttaaatgacatatatattcatttaaactaaaagggtggacatgcaaaaaatctgaataaaaaaccaaacaaactgcccagccagaattgatgttcaataaatataattcaacattaaccatttttcatcttgaataataaaaatgtttgtatcatgtagagtaatactagtatcaacaactaacaaaagcattgacgaaacaaacaaaaaagttgtttgacttaacaaaaatgatgtataccaagctactggtacacaacaaatgctgagaaattatgcaatgtcatgtacatattatataatttaacaatggttttacaaaatcaggcctacaatctggtttttatgtactcagaactcagaacatggcatcttaacacatcgtgatttgaatttcaaaattagatcattcacacatacaatcaaacaaaagcaaaaacaaaaaactgttatgactttagcacaaaagtaaagctaaactcaaaatactatgctattgggtgggatagccacatatcttaagtaccacatcaagcttcttaatctactcaatgtaagactgataacattgccacatcctttaagaactgatgtttacagaggctttttcctattgacacaaaccctggcaggtatttgcccctttcgcttacctatcagtttttggtacattactccttaatctaacctttaagtagccgtttccataggtcaacgcttaacaaaaccagtaattgttatgacagcacaaatgaagagtccaatccaaaagcccaaactcattaaccaagacaacttcatagcttaagtttcatattgctgaatataacatacatgaaagcatcccattaacaataaaggtgtcactgaactcaacaaaagataggtttttatgttttgtgacaaaaaaaaccattaacaatacccaattaagagaaacaaaatacaatgtcatgaagacaaagacagtacctggtaagcgtcgttcttctcttgttcactcttcactggcagaagcccttactcaaacaccagaacaggcttaaccccaaaatggcgcaacaaatttactctgcgcatgcaacactcaatgtgcctaaaacatgtcaatagacaaaccaatctcagttaagttgtttggggtgccataaaatacaatttgaactcaaccccagtgcatcaaatcgaacttttagtagttgggttactcccaaaaaaaatcaaatacaattccaataaaataatggtaaagaaaactgtgtaaggggggttacctggtactgggtatacctttgcagagttccctgccgctagagtgggcacctttgtggaggcaaggatatttaaaacaaggcagtgacaatgcaaccctatagtttgatgtaagctgtaagagaccatcaaagacaaaaggaaacataaaatgaagtaacaaatgaaaagcttgtaacattatttacctaaatagttaagcaagtcatagttatataacttttagcagtttatgatagaagctctggtcattggagaatgctgaagttccattaccatacacgtgacgagttcaacccctaaacacgaaatgaaaaacaaaagttttattaaaaaccctaccactgaaatctgaagcccgaaaaaccaaaatacgataatgactgaaacctgattgtgcgcaacacacgggttcaatgtgaagacacgaacaaggagtagtgatggcggactgagggagcccacgacggagagacggaggggatgaggacgagctgttttcgagtgttaggtcgcgagagggagaaaaacatgtctgagggattagcttagggttcacaatcaaatatgaaaatattttggttttttttattgagcgaatttttttttgtaataattaaaaatattatatataccaaatcaaagacgggttacgaacaaaccatcttcgaatagcaggaaacaaagacggttctcagtttacccgtcttcgttttacagaatctaagacgggtgttgtataaccgtcttcgtaaatgcctaaatatttacgaaattgccaccgcctcaccatctaagacggttatgctacaaccgtttttgaatgcccgcctttgaatgcaattcgtgtagtagtgaaacttacaagttacaagaatacaaatgctttcaatcttcctattatgaatggtattctcaacctttcttatgccttctgcaggttgcataactcacgactagtagtgtaggattaggatatattgtgttgtagttgtcaattatgccttatggtaattgttctgtttgtacgggtggtactaaagcttgtaaactttgctggtattgatgtatttactgttgttttctgctgttagaccacttcttgtgggctgtaacattgttaataaaatttaatttgttggttgctaaataaaaaacaagaatactttagggttcaatattaagccaaggacttcaattataatagttaaaaaaaatctcatcgttttaatggattttcatcgagtatttttgtctgtattaaataaattgaatttgaacgaaaaccttatctgatttgcatgggtctcatggtaaggttaattatctacataaagtagacacatctccccttttaatactcaacaaatcttagtgtttttgtttagcaaagcacgcgactttctccttaaaaacgagttcacttttgttgtttagtccttgaatttataatttatttatgtgaatgagcagctttaaaatttataaaacttattcacaagttagtttcgtggctttgttagccaaagatattaaaaccactagcatggcgtgactcgtgagttgcataaatttataagcttgcttgtacacataaaataaataaatttaacaactaaaccacaagtgggagatatttcaaggggctatcggtcttgccttaagaaaatattttgtattttcattaataattacaaaaatatataaactcttttcctgtaagaaaattggtggaaatatcactttactatttttatcattttctgtacaaatctttgaaaataaaaaattgacatttatatgtttattaacaaaagggaaaagcatttctttatacctaatcaccataggttttctattggctctaattttaatatgaataaataatatatgtactaatagtataattttttttacaactgttatgtgataaatttgttagtgtattttaaaaattatctaaaaaatcatactaagaaatatttatgattaatggatagtgtaaagacttacacaatacattcctatcaaactctttatattctattgctatattaccaaaaacaggaaaaaggttacaattttagttatattcccaaatgtatagttatccttttgaccaatttggattggaaaacaagatcttcatgtatctccaaatgttgcacatatgaacagataatgatgtcacaccttgggaagctccttagagctagttttcattattaggcgacaaacaaacaccgcaagccgcgagagtaatctcagttgtgataaatgaggctatgtatacatgcatggatgatggccacaagctataaacctaacacctcacactcgctggattggcaatgataatgttgagaaacacaatgccccatttggattagaccaagtgcttcaacaaaggaaccaaaaaaaaaggccacaaaacgcgttaagcggtgtagaggggtgccccatgtgacaagtatatgatgcatgtgacatgttgcatcagcaatgagttaatgttgtgcatttcaatagaagggtacctaaaacatccaaatttgggtttggagacgaggggcaaggaatgggacaatggacataatagagcatttgatgcgtaaaaaggcacatgcacgatcaaagcatcatgtgcttgctcatgtcacttgtcaccatttaaaattttaaccctttttcactttcagccccttttcaacatgcaataagccaaaaagtgttgacagttgacacattacattttactttaacgagtaaattctacgaatattccataagcttttctcaagttacacataacattattattttttttccctatttaaaaatattacactgatgtcccttcatacattatactacacctataaagagacaaataaggtaaatataatgattaaaaagatacttatataattatacgaaatctcaagaatggttagtgtaatttactttactttaactaggaaaagttgatctaggaattagaattttccttactttttattttgcataacacatgcctattagtctattacatagtgctgatcattaggttggttaccatgtgattgcaaggagatttaacaaccaacaaaaacaaaagactgtacagcattatgcatgtgggatcaatgatgtaggtaaaagagggaatggaaatttttctatggcacatgctgatggtgtatagataatttaaccatgacatggaatctgagctgcaaaatgttgaaatgcacaacccagtttcaatttcactagtacaaatcagggcctactaatttgaattaacaggtgaatgtttcagacaacaaatccttcaaattgaaggtggttgcagcttttccatcagcagcaatctttgcagtggatccaatttatacagcagaggctcctatatctatgcaccattcatggcagagtctgcatggagtgtattgccatcttccatgatcttgccattcacctgagttctctgccgctgagcaaatcaaaacaatcatgttatgtccaaatcaaagacaaagacatgacataaatggaacaagggtaaggacaagtgcattcaaagtacccaatctgcagggtctccagaattcccattcaatagcttgtggttctcctctttggtcctgctgtctttgtctttggtgctcaaaggtagcaaggttgcagcggcaattgacctgtctggtaattctgcagaataactaagtcagaacaacagcaaatggcaaccaagtaaagaaaatagctatgtaattaagtgcatgtgacaaaatgtgctaacctggcaatttcttgtcaatgaaaaacaccaccaaattaacagtgtacctgccagccatggaccaaaaagatcaacacaaaagggacataggccacagttttcacattacaaaacaaaatatatgctccttaccaggcaacaactacgtcaactgtgtaatgtttgcgagatgctactatcaaaagactctgaaccacagcaagcaaccaccctagctgctttattgacctggtggttcatcatgtcaagagttacaaaaatcagaatttaaatttaaaaacaacagaatatgtgacaggaaggactgtaaatgagatgaataataaatgaggagtgctaccaacatactccttctaacataatttcttattcgttaaaatttattgaaaactactaaatcatgagtgagattcattacataaggtgtgtaaccacaaccacacaattttgtgagttccaacaaatttcagccaataatagagtgttttaaagaatgtgttgctagcgtttctcataataaattagccaaactgcagtaaaatctcatgacagacttgattcttcaacaaacacaagatggaagacatttataaaccaattttaccttcgagtgccatatttctgatacgtgagcacaaaaacaagtgtaaagatcatgtgtgatgagaatattaaatcaccacatccatagaccacgccacgcggaactgtacatataattgaaatgagtgtcaaaacaaacacaaaggcatcaaatatgaacaccttcaatacaataatgtatactcacaattaatcaagagcacttcaaggacactatctggacggggtaatgtggctagtttagaaccctgcatgatacattaagtagtctaaaattataagaatctaaaagataaataataaaatatcttgcacatatatgctatttacagtgattaaaagaatacttaaacacaacatgtgacatgttttgcaaacacattgtcaaataattgtacctcacggcaatggtagtttggaccaggaagttgtgtagaataaaatgtgattatgcgaagaacttgagaaccctgcagtacacaaatatgaagtgagaaaactggcatattcccatatacagaataggcacttaactctatctgaagcatttaaatggccagaaatatattgtgctaaccatataagaggaatagaaagcaacacatgatgacatcaaataataataaaagttactcatgttagcattaaaacctgcattttatacttgaatcatcctaattcatcgatctatcaccctaagaacttatttattcaattaggatttccaaaaatttaaacaatacttattatatatgagataatgtgatcaacacttacaactaagaatgctaaaaccctgcaccatattataactgtgtagatctttctgttcttcaatatgaatggatgaaatgtccactgcaaaatcacatatcaaagaatatatatatgaaacttcagaaaaataaataaagaaaagaaaatgatacttgtttaaatgagaagatcacaaaaataagccatacaggccaaaagggatttttaaaaaaggaaaacaagccactgaaacagggataatgtgatgcaatagcagaaaatatcaagcaaagatttaacaggaataaagccacagaatcaagattaaaataatccttcaccgaaatctgtattaaaccactaagaagaaacttcaaaccacaaaattaagaaatgatattagcttttattttatttgtcattttttttattttccaacaagtcattctcaatagtcagtacaaacacctcgtgtgtaacttttcaagcctcacaaagccacaacgaatacaatatataagaggcttaacagtttagtattctgacttcaaggaaacaccaggggtgggagtatagcacacattcatgatcaagccatatttaccttgagaatttatcacaccaaaaaaaatgttcatagcagaatatagaattgtctccacgaattttaatgtcataggtaggtaaaatataacctatcacataaaaggtgggcttaaaaaggtgaatcctgacacaacacagtcatacagttaatatatgaaaactttaacagagaacgggaagggtggattcttatcttaccaagacaaacgatataaaaatcatggcaaacagtgtttcacttatgtaagctttttcttgcccaagctcctgtgataacagcaccaagattaaaaattacaagggcattcttatcattctatgtactggtttttccaagagagagaaacgggaatgacaattacaaaccggaagaaggaagaatccaacatcttgtagagtaggcccaggcctatgtaaataatgaactcctcgggcagccaaaccatgtatatactgtagagaaacagttaaaattcagacatcaaacattgcaacaaatagtatgtcaagtaatcaagtaaaacaatgtacaatactgtgttacactttatacatacataacatagacaagaatagaaacacagaaatatatactttacaaaaaaatgccattcttatttctttttcattgaacattggccctcaatatcttttcctcaacaactagctgcaaactatcaaattagtttccaataatggaaatgaaacatttgatcctttcccagaacccaaagtttcacagagaagtgaggataaggtaaattttgtttttaagatggaagaacaaataacttatcatctaaagcaaatcatcatagttgcagaatatgacaaaagatgcttcaagcagttacaagttcctaaaattcccaaattaaaacactcagacatcaactctgacacttcatagtggctgacaaaataagcttcggtaatcaaagcaagtgatagtaatactacggcaaccctcattcattcctaaccagaacaaacaaaataagacaaaagcaagcaattgtagcactaaccacaccaacaaaaaccatgaacaagaaaaactgaactccatgtagcatgaaagtaaagttccaatccaccaaccataaaacactttcaaaaacaaaggaaatcaaaagggacattctacacaaaaggtaaaccacaacttgagcgaccacactcagccattgcacaaggttgatcaaaagagggggggaaacctgacaaacaagaccagccagaaggtacttccaattctcagcaacgaggttgacctctgtagttgtctctgcacaaattctcttccatagctacacaaatacacaccaaacaccaaaataaacatccacacaagaacacaaaaaaagaaacaacaacaccaagagggggtggggggcaaataagcaacctttgaagcctcacgaccaatgtaaaacgacatgttattgtccctgttgttgtcgttgatgggctatgcgcgcaaggagcacttccatattacttcataaccacactgatgatagagtcaacattgattggccaatatgaacgatacccacatagaattaatccctttttaaacttcccactatgcaaaaccgaaactttggcataaataaaacacacccagaaagaaaaacgcaacaggatatccgaatccgaatcgggaagggaaaaagatcggaattttaatgttgatcacaaacagaaccgtgcccccagatgagaggaatgatcacaagaagaaggaaaaaaaatacagaagaggtttcggtggcagaagaatcaataggggaaatggaatcggaggcgcaatggtcaaaaggggttttcgtttctctctctactttctctctctgattcttcttctctttctcgcagtgtttttctgactgctatgcacgcgagatgaacacggcgagacagttgagcatagagtagaaaattataaagagtgcccctattttttatatttccaatccaaactattttaatcttcttcctttaatttacacaaaaaaaataaaataataataataattcctaaaaaatatactataattctttccatttcttaaagaaaatgctaataaattgttagactgtcatcccacgaaagattatatatgttaaatttattatttttaattaattactttaaaaaggtgatttctctcataattttttatcagttaataatataaaaatatttacatgaaaaaagttgtgttcatctgttacctaaaaaaagttgggttcatttgtattattttatttgatatttaagataatacacatattttaagaaaataattaattaaatcatttttatgataaaataatttagggagtgtattggattaggattttaaaagactattttggcataaaaatcttgtaaattttaaagattatgtaatatattataacttatcatatttatttacaaaattttttgataatttgaattttaatgaatttatatcataagaatctaaaggatttaaaaggaatttaaagatttataatatttgaaagaattatgtgaatttttaaaaatatttaaaattactagagttagtgaaaaaataaaaataaaatatgaggtttggataaataaaagtaaatccaatataatttttttaaccttttaatagttatattgattctaacttgatgttctcctatagtaacattaattgcgataacatctttttattctcactttttgatttgaataatagatttaaaattatatattgattttcttaatgaggtggaataataagcatatactataagggaatactgagggtaaaaaaattggtaggaagattacttagttatgtggaggaagcaattaaaggtgacaattacgaaaacattacgtcaaacaggcgatggatggaaatagccagtgtaaggaaaatatggttagtctttatacataagataaacattaatttaatttaaaaaactaacgaaaaagtgtataggaaaagagtatatttagaaaacaaaagaataggaaaaatatatatgacacagacatcttaaagaatattaaagaaaaaagaggatatgtgtgatgaaagaaaagaaagtcgcgtaaccaatagaaaaagaaagaaaaacgtttagcaaaatctcaagaatttgggtgacattgtttgataaatggtctatactaaaagatctaattaaatccatcataatcattcttacaaaaattatcaatatttgtatatttttaataccaaaagactttctataagttataaaaaaaataattgaatacaaccttattttgttgtcttctttaaaaaaatttaaaaattttaattgaataccacaaaacttatttatactatttaaaaatcttgattgaatgtcatgagacttttttttaaaaaaatcctttaaaatcttttgaaatcctaatcaaatattcccccttatcttactaaaatatttttactaactacaatgtataaatagttttaaagaactacaactgtatagttagaaatatacttttaatagtgtatttaatattggagaatattattgaaaaataattaattaatattttcttgatgttttatacttaaaaataatttgagataaaaattgataaataaaatggaatggaaagttttgttattatttattattgatataaaatatttatcagttttgatgataataaatttctgtaaaaaaaaattggtttaaccttttagtaacatttcttttttaattaaatttttattcaaaatattcaatttaaatttgagactttatttaatgaaaagagtataagatacaatacataatttttagaaaataaatgagagtatattagttattttcataataatcatctatctataacaataataaaaagaatatctcattttaatttatatctttaattaacctttttttagaataatccttaatttacctaattttccatttatccctttctctctcctattttatgctttatttctaaaagaatattctgttaatgtaggtaatgtctgtctttctaattttaaaatataaataataaattcatgttttttacttgagtgataacaataataaaaggaatgtctcattttaatttattcagccaaaaaaatctcattttaattacctagttggccatttatccctttatttctccctctttacgccttatttccaaaaaacaaactgtacctataatacattcatgtttttataataatagtaataaactttgccttgacgccaaccctttatctcttgctgaggctgttacaaccaaaatgagtgaataagaccaaatccacaaaaacaaatagaatcttctagcttttgaaacaatcagcactgttagtcaagtaattattaattaattaaattaaaatgaaatccttgctgttatgtttttatctgaaaaaaaatcagtaagagtgacccgattaggataggattcggtgagaattgacttgagagttgaggcagcaagagccaattaggctagaggactgctaaagaaagtagcaacactctaaaatatttttttttctcttgattaacatacttttttattgataaaaatttattgaaaattataaatttaaaagagaatcattaaataaaatataaaattcactaaattttgtaaaatattaataaattttaaccaataaaaaaatataatattgagcatatttctaacatttctcataaggatacgatgaatctgtctaaaagcggcaaggcttaaacaaaatttaaaaatttaaataaaataggaataatattatatttttctttttcgaatttgaatccatgaccaacaagtcactaaaacacaactttacccttatgtctggacatatcctccaaaattaaatataaatatgttgtagaaaaatttagaattattcataaaataatcatagtaacgtcttttactttattttattttttagaattttttattaatttcttgttagagtttaattgttcatatgctttggtgtaaagaatttatattattaactaggtggaaatatgtgtttttaagtgttggttttcatatttttatattaatgaaattaatactattagaaaaaatgtttttcatatcgattgtttttcacattccaccacggtttagcaattgtctttgaagtcgtcgtaaaatatcaacacttcaaatttcgatttctatgtcggttcctttcgaaaccgtcttagaatatgttttttgtttgaaaaataattaaaaaattgacattttaaatatggtttttcataaaaccatcttacaaagtctattttaaaagacatttttgtagaactgtcttataaagtctattttcaaaaacaatttttaaataatagtcttaaacaatagactttttaagacagatttttgtagaactgtcttagaaagtttgttttttaagatgattttctatagaaccgtcttagaaagtcctaaagaaccgtcttagaaagttctaaagaaccatcttagaaagtgttgttttttaaaataataaaaacaaagaaatgaaacatcaatgtttagagtgagtggtagtgcatagggttcacactcaaaatactacctgaacatctcaagtgtcatactatgttacaagtacttagttacaattaagaaatgaaacttgacaaagtatcttcaccgaaccatagaagtatcaggatatacacaatataaaattaatattaatttggtcttatgattatgatactacttataaaccttaatatatagatggaaggttaattgttaaacatcgaagagccacatcatagaaggttagtttaacaacaacagtctaaggagatattttaacatttctaaactcaaattaagtagtagtatttcataggataaaactaccaatagactaggtaaagcaatttggcataccaaaagaccaaatgccatggcttatatggtgtgaagcgaaagaaattattgcacaaaattagagtcaacatttttatataaaaaaaaatataacaatgcaccacttattttctattagtaacatggccttgtaccactgattaaccaataactagactagagataacattttctttttcttgtgtatattttataattatccaatattatactaatactcttcttagaacacaacttttttgaaataaaaaatggaaacaagccataatttttaggccaattaatatgttcaagttaattagttaaagggattcttgccaatctgtcatttacatgtataaatcaaaatccaagcaaagaaagttcaaagtaccaacctcatggtcagtagttgaagtctcactagcttcttatgaaggatccttaacatgtttgctttaacttcaattccaaaattttgttctcgcttgctaaggaagatatatgtagataaaacgcaacatttcaacaagccaaataaagccataaagggaagatatctcacttttcagcatatcattcatcaaagtcttattggttgttgatctttttctacctcatctatcatctaccacatgcatgatgacacatagtagaaaacaaatcttgtacaataaacgaaaaaatcaaatggaaaaaaattcttagtcgaatcacacatacttgcttatgcacaagaacgaggtggtggctttggctcgcaaggtggcattgataaccggaattactggacaagatagttcgtacctgacagaattcctcctggacaaggggtacgaggtgcacgacaagatccgctgctcgtcaaacttcaacacgcagtgcataaaccacatatatgtggatccccacaagacccccatgaagctccactacgtcgatctctccaatgcctcctccctccgtcgctggctcgacactatcctccccgacaaggtctacaatctctccgcccagtccctcatcactgtctcctttgagatccccgactacaccgtcaacgtggtcaccactggccccctccgcctccgtggggtcgtccactcccacatcagttactaccaagccagctactttgagatgttcgacaccaccccaccaccacaatcagaaactaccccctctccccctacgccgcctccaaatgcgccgcccactggtacaccgtgaactaccgcgatacctatttcctcttcgcctgcaacgacatcctctatagtttcagtgtgtgttcccaattatcaagggaaggggttcttcttctttgtctcacttcagattgagtgatcgaggtggaaatagcgtaaatccaataattttgtgtgaaggaaatgcgaccaatgagaaagaaagagaagaggaagcgaaacaacgagatttcgttgagaggagaaaattataggaatttcttttaagtcttgttgggagagagagtgagagaataagaatgatcaaaagtgtgagaccaagagagctgcgcgagagaatgagagagcagaagcgaataagcgtaaatgcgaaggaatttcaaagacaattttttcaaaaccgtccttgaacacttgttttgaaagacgactttccaaaatcgtctttgaatacttgcgtttaaaaccgtcgtcgttcatttccttttatttacaaattttccaccacgttttatttaagacaatttcaaagaaaccttcgttgatttgacgttgtaaaatactatttttctagtaatgtagtctccccactttattaatcagcggaggaagtcttgggtagatactaccctaaataccctaaatatgaggtggtagacacaacaaataaaaatttgacacctcattaaaatattataaattaattaaaaataacaatttttttaaaatgttacttcttctcttttttttatctagttcaaccgagatgtctctctcatagtcaagatattgttgttcatagtgtccctagctttcatcttccctcactgtgcgatttcaaagatgtacattttctggtggtagtgttagtgtttgcacaacgagcggcaacctccgatcactactacaaaagggggcttcaaagacggttctttaagctattcaaagacggttcttgaaccatctttgtagccaacgtcgtagaaagtgttaactttctacaacggctttcaaaacagttttaggatctcgaattctaagtcggttctctccaaaaccgtcttagaatgacttttttttaaaaaaaaaagttgaggattctaagacggttgttaggaagaaccatcttagaatatcacattctaagacggtttttcttacaaccgtcttagtagatggtttttaaaaaaaatagaattgcgtgttactaagacgattttagataaaaccgtcttaaaatgtgacattcgtagacggttttagagagaaccgtcttagaatgtcacattctaagacggttcttcctaacaactgtcttggaatatgctttttttttaagattatactattgctaagacgattttgggaaagaaccgtcttagaatatgcttttttatatatataaaaaaaatcaaaacaagacggtttttcttcctaacaaccgtcttaaatgactattctttaattttttttccacctcattatatatatatatatatatatatatatatatatatatacaagacacagagggagaagagtgagaggagggtcaatgagaatacgcagagggagacataaaatatttaaaaaagcgaaaaaccttctaagatggttttcacaaaaccgtcttagaatgatagtctttgaagatgatttttgggaaaccgtctttgaatggaaaccattctaagacgattttcgaaaaatcgtcttagaatagacatttctaagacgatttttgcgaaacagttgtagaatagttgtatttatttacaaaaatgccaccgtgtttctttctaagacggtttgttaacaaccgacgttaaatcaacgtcgtaaaaatccctttttctagtagtggatgaagcgtaacctttcaccacctcttgtttaaaaatctgcattttcctgtggtgaagtcggcgttaatgtcttccgcacaccgagtaactgcctcctatgaagcttaataatacaaaaaatatacaaattttgaaacaagaaacaaggtcatgactaatccttctatttgaaccaatcattaacaacacaaatcaatctcaccaacctcaaaatctatgctaaatccaaagaaaaaagcatcaaacactagcattatatttaggatagagaagagtgtactttattattagctatggttctttcaagtatgctagctgggacagagcattataggaagccatagttcactatgtgccagtggggtgaggttcaattgtagttggggaagaagataaaatagaagaaaaaggtttttttactattttattattcttttttaatttgagtttttgatgtgttgtcacttcttaatggtgtgacaccatttgattggatgtgtctaacaaatcatatttaaggaaatgtctatgcaagactttctcttatgagtgaccatgatgaatgcaataaatgatttgatttgtgacaatatgaaatactactataatataatttatgataattttgaatccttagaacttcatttataatttttttaaatttaacattttattaaacagtcttttaccactacaaaatgatcatattgcataaatctcaatcgaccaaattcttcacaaccttaatcctaaaccttgacctcccaccaatctctttcacctttttttttcctttgcaaaaagaaagcaaaaagaagggaaaaaaatattgtacaaaaacaaaatttgtagtaccaaaaaaggaaaaccctcatatagccttaatgtcatagactcatagtgatcctcacatgacaacaatgaagagtttgtcacaatggccctgaggatcacatccttcaagtcagaatggggcaagatgtgcaatcctttctttgaagcaaccatcaatctaagacttaaaaaccacaacctataattaacaatcctcaaaagttcaaatgctcataagaccaacacgtgcaaaaagctcaaatcaatgtaatcaatggtgccactgacaatagtgctcatacgtctttgtgagcatcatggaggtgaagtgcctattcatgttgaggatggaggagaaaggttggtgaagcctctctcaaacatgccacttagggtgaggatggaggacttgaaatagaggactaaactagttcctcaaccatttgcgactatagtcatcgatcaaagaagtgctcaatggtgtcattaacaattgttcatatatgtctttctgagcactgtggaggtgaagtcttctattcaagttgagggtgtagaagagaggttggtaaagcttgtcaaatacacaccaatttgggtgaggatggatgacttggaataaaggattaaactagttccctaattatttacgactatagtctcgatcatagaggcaccacagtgctctctttcaccttaattgacttcatcaatctcgcatggaggaccaagatctacaactatgatcaatctagtgacattgattccacaaagcttagaaaaccctagcttctccatcaccgactcactattgaattttgtgttcaatgttatggaaattttctaattgcaaagttttaagaaattgtgatcttaaaacaaatatcacaagaaggggggatgaattgtggtcttaaaaactttttaagcattttttcaagaaaacaaagtcatcgtctgaaaaactttgtaaaacagataacggattttcgcaaaaactttcaaatgatgaaatacaaactttgcaatgagaaacaattttcaagcaaaaaacaaatttaaatcctaagtcattttaaacgaaaggaaagtagaaagataaacaaacaaaaagatttatactggtttgtcttaaccacaaagattatgtccattaacttctcaaagttacaagtattttgtcatggactaattctgactctacaaatcaagctttaccccaagcttgatgcaacccagtagtctttgtcctatcaaaccactattgtctttatacaaataaaaaagaattgttgtttgtttgcacaataactaactcttaagcgtcttataaatgaatgtgcaatatcaacacttagtcttttctctcaatgtgtgttcaaagtgttttgggagctttttagaactatgtgaaaaatttacaaaatgatttttacacaacatatatgaatgtttgcacgtaggttcgtatcttcattttttcaaaggttttggtatttataggcattcatcttcaagtgttcattgtctcacactagatgagtttcttcacttaaacttgtgtttgatgcttatggttgttggaacatttaatgtttacattaaatacctcatgtagtgaaaccactttgattgactttcatgtaggacactttagcaaaaaaatcacttcccttggtcgagcaagcctgccacaacaaaacacgcgtcttttgatgcttgtttgtgtaacaccccgtatgcatccggtgtattatcagttacttaataagatttgcgtggtaactaatttaattaaaatccacggaagcgatttcaaaaccatatttcttgattcattatgtatggtacgtaacctcaattaaatatacaaattccaatacactatagccaaccttatcgatccaaataacataaataacgacagatacatcaataatatctatacagatatatcaagagaataaaccacatgtatttacatatacatcatcaaagacactcactgtgtctatgccaaagaataagcacacaatgccacaatctcacagatcactatctcacacgagggtacaaaatacagaatatcagaacatcataatccatacaggactcaaaatatatgcacacgcatatcttcccttgcaggggtacaaaacaatatcatatacaaaaagtaatgagccacaatgctctcaaaatacaggccaagtagctatacagtgactgtccctactggggcctcccaccctgggaactaccatctctgccagaagcattacctgtaaaacaacatccccaacaggggtgagatacaatctcagtaagctcagggctcttggatgcttctccttccccctgactcacttccatgatacacaacattaaaggcatcacaatcaccaggcctcctggccctcacaacaatacatagccatcctctagctctaatgtatatccgcgtcactatgcccgccaaagaggcatcatcatctgcatctgggactcttagtccccagtgtgagaccggaactcatactcgtgccatcccattaggagctacccatttacacatggatgtacgtatatggcacctccgagaattggcttcaaccgcgacaggaccacctatctcttggttttaagggattatcctcaccctttacgtgagcaaaccaaactaggagttgtgctctactcctagggagatccatatctatctaactgggtagaagatctattcgataggcaaccatacgcacaaagcatagaatcatgcatacatattatcatgagaaaagttgtaacaaccaattcaatgcacatgcttcatgtatgaaaccatcactccctcggagtatggtggaacacaggcagtgggaaacattcaccaagacaaagaacttacctgacaacgcagtgctctgctgtccaatcctagaactgtggtctacaccactgacaccatcggtgtcacaccctatacaaaggcacacaagcagaatcaataaccaacctaaccttacaagacattaagtacataataacggttcttaactgttaaaaaggaaagaaacattattctctttcataaaaaccccttagtatcctatctcaagcttctaaggctagtcacctaactgatgacttacagacccccaccaggatctatctcagcctaacaaaggcgctagagtctctctaagactctgcataagccaattcaaaggattcaatactttattcaggccaaaactcaaagattaacaatatggctaaaacggttacttcaacacaatttcaccgtttatatagcctccatagcacatattgtacaagcatcaagtctcatgcatgtcatacaatcaccaatttaaccaacattcttcctacacatacatttctcagagccaaataccaaagtccataaaaatcatatttcaaggctaatccttcatcacaacaacctcctaagcatacttttccaaaggacccaagcctaattccaactctaactcaaatgggtcactattcacctcaagaacaaattcttaaataaatggtagaatttgtgtttcttacctctaaatcgacaaggaaggttagaggacaacttctccaagcttgggtgtccatgaatcgcctcctttccctgccaaactcaagttttgtgaagttccctagaaaacacgatctctccatttgatggtttttagggaaaagtgatgaatgattctagctcatggaggagttccttacaactttctagttgaatgggaagtgtttagatgaagattggtgaagatatggagctttcctagtgctctaatggcggaaaactaactaaggaagaagaaaaagcgtttttgctgacccaaaatgcgaaaatggccttttataggcccacagcgcgagtcctggcgctaatggcgccattttcacgctaaccgcgccaaaatctagagaaaaatgatcttctactgcattctcacgctaccggagctaggttccagtgaaaattggccttctagtgcattttcacgctaacggcgccagattctagccgccgctaattacgttgctaacgcttcttgcgacataatattgtaaatttaaacttctctttctttctttttcttttatttatttagccttggttattatagtttgccacttttagaacttgaacttaatttattcttcataagattcgacatatcctaagagaatatctatgctaaatgaatcttagaagcagagaaataaatgaagtatttaaatgtcatttgacatatgttgtataagatcatggctttagttcagtcgcaggatcatgaagcatggtcatgtatagcataagacataacttttaacatttgtttttatttcatctaaccaaattaattaggggtcttaattagtcttaagactcaaatttgtttagacttaacaaagaattacttcaattaatttctagcatttattatttttttgttaaatttttaataatttacaagtacttttaaaaaaattaattaatgtatctaaaaatttaaaataaagatattataaaaatggaagaaaaagtttaaaggccattaaggacctagagccgaatctcatctgcgaggttcgtgtgtcaagcaagtttttaaagagggttcctagttgtcttagtttgaagtgagagcccgaatatactcttttcgctcaccaaccaaaggatttacctctttttttttttgtttagcttcaggggggaagactttctctcctttatcgatgctctttttgtcacgtggaagcactaattaatgagaccaccaaggcccctaggtaagacgacatacataaaaaaagtagaacaagatgatctcgaagttctaaatccataataaaaggagaatcttcttatcaagataagtacgtagagtgaaaaaggaaaaacctctagaatgttataagaacaaaatagagagagtaattaatccataaatttataacaaataataatttttaatttaatgacactacatatattttaattaactttttactattacatcttaactttacataaacattaaatacacaataacaatttgttgggtgttggcaattttcctgtaataaatatatgcattgaattttagtccaaataaaatgaattagtaatataaaaaaagaattagttgatataaatattaatttgtctttattaatgaaataaaaaaatattttattaaaaatttagaacttaatttttatatattgttaatataaaaatttatattatcaatcaagtagaaataataataaatataattttaaaaataattattcaaaatattaataaatttatcatatataataacctgtaattaaataagaagcaaatcatttatattattagtatacaaatatgtactgaaaaatatttatttgacatttttgaaaaatatattaagtattttttattaatattatttaaatacttatgaacaagaattaacaagaaatttaaaaagaaggtaaagttagcataaataatagaataaaaaagtgataaaatagaaaataaaaaacaattctcaaattccaatgtctctctccctcccttgttttgtttgggaatttaaattttgaaaagtgacagaggaagaacgtgcaagtttttaactcgaggacatgaaaatattcaaaacagaagagaacgacacacccacgatagagaaggagcatgacacgtggcgaaagaatgaaatgggaatccaaataatctattattattattattattagtatcattatcattatcattatcatcatctatcaaccgaatgaaaataagcgcggaaacggcaacagtagggagtgggaagagaggaacatgtctgtcactatcagtggactggagaatttcaaacgtactaactaaaatattatgtactacaagtacaactatcattatacccagcttttaatttttaaataaaaataggaaaaagtgttatgcattcgttatgtaattttttttataatcattcaattataatttattatatatatatgaaatttattaagtttcaaaataattatcttaaaataatttaaaaatattttataattgaatgataatataaaattattttattttatattatgaacacacattcattaaactaaaaaatgcttaatttttaatttgaaaaataataataagtttaaaatccttttttatctttataaatataaaaatgtttaaaatttatttctgcaaaatcttgaatacatttttttatcatcataaaattgaaatgtgtcatttttaggtctagaataatatttaaatttaaattatagttttttcatagattataagcatgacatactgttaaaaaaaattgtatttgcattgattgtatatataaccaatgtaaaataccatcatcataagtttaacattatcctaatttatctccaaacaaaaaagtgacacatttcaattttgtgagaaagtaaaaatatataaaagtttcacaataataaattctaaacatttttatatttatgaggacgaaattatgtattagccataataatatatgcattagtgttttagatgcattcattttttttcccagtaacattggtgcatactgtaaattaagtatctactaattttataaatgatcacttttaatcagattttttctaacaatcacattttttatcaaaagatttaaattcgacactaatgatttattataaatgaaatgataaaaaaattgaaaaataaggtagataaaaagatgaaagaaaaagtgagtgtatatttataataattttttttaattattttagttttagtttaagacgtaatttcatgatttatataattatgttgtatttttgaaagagtagtggacaataccttttgtttgagtgccattatgaattgtcgtaagccacgactccatccaacctgttgcaaggtcctgccagcaacaaagcagtgagcatcatcccttcccccccacacgaagtttcattgtcgactaacttatgatttccgatccttacaagatatatacatacaagaagccctgccagcaacaaagcagtaagcaccatccctcccccccaccccaacgaagtttcattgtccactaacttatgatttccgatccttacaagatatatacatacaagaagcatgtcatgatcaggccaaagataggagtataagatgagagaatttcaactacataattataattaatacaaattattaaaattaaaaaataattttaactattcaattttattaattaactttcatctttcaattcttcaatattagggatggaggcaagtttaaatcacagcagggtaaatatatgacttgtagggcatgtaacaccccaaaatttaggaaattacaaacaattactaagagtaaaatgttaatgaaaggcagtagaaaaatttagggcaaaaggacaagaaggcccctgaacaatttcagaaatgacatttatgtccctagggtgagaatgacaattttgccctgaacaattctgaaaatgaccaatgtatccctagatattttagtaagatatttactaggagaaattaccaaaatatccttggacaattttgagaatgacaagttaggtccctgaggcaataaatgaccaaaatacccctggatattttattaatgaccaaattgccctaggaagtccagtaagacattttaaggaagaaaggttattaatatccttagatgttttggaaatgaccaaagatacctttagagtaacaattatagagatatactgaacttttttttgaaaatgacaattttgcccctagagtgagtagtgaaattaccaaaatacccctaggtcaaaactgaccaagatgaccttagaaattaataggaacctgagcataggataaaatacttttagatgacaacttatcagcaaggttgacggcagaaaaccctaaaatagaatttctacgaattttggaagataggttgaaaagagcttaatctacacaatctcaggtatcagaaaattataagaagaggacggacataatctatagagttttctcttaattatgaaaggaaaatgtttcttcaatgagttagtttagtaattttaataattcaaaagcaaaatagaccaataagaattccagtaaagttattatatgtaattgaaggaaaaattggttgattagaattcctaatacaagctttggtggtatgatgcaagatcaacgaagaaaagctctaagaaacttcaagaatggacacatggatgtttaagaggcttaggaacttgctattagtccaaatggaaagttagttataaatgcttaaaagatatttgaagcaaattttattttgtttccttgggcagaaaacttagacatttataggccttatttcaaagatcccaacggtcaaaagctagatatgtaagttaagagtataccattaaaattttaagaagatccaacggttaacacgttcagaatcaatatttttgtaacacgggtttgggcaaaaattttatgactaagctacccacggatttgaatgaaaccaaaagaaatgcaccaagaccaagcaatttcacgtgcaaatattagaaggaggaggaatggtgtggaactctcatgaacaaggacacttgtagggtgagaaagtgttagccaataagagaaaaccaaccaaaaagctatgtaatcataagttttgaagatttttgtagaaaagccaaataacttagcctataaaaagagatgcaaaactgaaactgtgggctgtcctaagagagcctaaaccgtgcaaatatccatcccaaaagcttgtccatttcctttcatcttaatactattctttacctagaacacaaaacacaaagcctaatcctagaagtccatgtgaagattagccactttaggagcaaggattcttcaagtttaaataaggaaggctgtccaaaaagcttaggaaaccaaggtatggggagtttatgttgagcttagtttgaataataatctttgtttgattttattttgttttgtagactaggtgtttgatgaaatgtctcaaagagcttgaataactacttgactaagtaatttgattctaaattaaataactaatggttggatgaaaaacttgaactaaatttaataaagaagagtaagaagtaacctaaaattagtagcagtatacttatcttgaatgaattaagaattatggttagattttactataaatttaatgttggctgaaatttcttatattgttctagggatatatatatatatatatatatatatatatatatatatatatatacacttagtttgacactagaacttggatgagaatatgtttatgatgaacttgtaaagatccatgtttatatagctttcttttacaagtattttatactgcacaccatgtgtttgatgatttgcccaaatgaatgaaatatgcttaagaattttgggcttgaatccttgttgttgagttaaattatacttatgtgggtggttgctttaataaaagttatgtattatttcatgtgtcgctgagtgttcccatgtgttgctgagtgtttctatggaattttccatgtaaattataatttatctataaggaatttatgaagttgaaatatggcaattatgtaaagcttgatatgatgattgaaaagaagtttgattgttgtttaaaagtatatgctctgaatggtcaaggatgttgagctttattatgtgttccactagagtgggtgaaactatctgatatgagaatttgagaaataaaggagtaactgaaaagaaaaatgaatccatgcatcatttgcacttgacccctcagagtggagggaggtttcactagagtgggtgaaactattatgatggtaccctttgaccctcagggtggagggaggtttcactagagtgggtgaaactatattgattctggtacctttttaataggattctgagatctcagtcatgcatcatataaaaagataagcatgcatcttatgcatcatatagttgggtatacgtaggatgatctgtatattgtataagttgtgtggtctttttatgattaagattttatctatctgtgcttacatatatgtgtattattcaaactatgtttgtcataaacttacccgagttgtgtctgtggttgacacctgtgatgaccccaattcatttgggcgagcagaggaacagtagtagctgagtatggatgagggaatgaagatgtgcatggatgattggaagatgtgatgtcgatgttgtgatgcttgtggttcatatgtattttgaactgtctgtatattattggacatgtatcatggactgtaatatgaactgtatagtggactgtattcttgttataaataaaccgtggtgaggaaaatcgtttacgccatttacgaatcacaaaacaagcaaggcaaaaagaattttcgtgaaaaagttacaactaagatcatttaatacaaagtggacatgagtttttaattaaaatcaatcaagcacgagagggttatgagaggcgttacagggcaaaacaattgtgaaacttgtaaaataatatttgagttgaattaaccttttgttaagtggttaaaggttttgaaaacagttcaatcaacaaataagatttttaatatgggatttcacattaaccaaaataccattaagggttatttaatcaaactaatagcatagtttattttcaatttgaggaaatgtacttgttccgtatatttccagaacacaactgtatagcacgaaagtactatgtgtttgctgtttgatcactctaactttgcaattccaaggatatcaatggagaatgataccttgaagcagaagatcacagagatacaccaattgacgtggggtgtgtgctctgtgtaattaaaagagagagttagaatgaatgtgtactttttaggtgcttataccgacgtatttatgagcacattaccttgccattggttatacgaactgcttatgaactgcttcctatatttccggcctcaatctgcacgtttgtaaccgctcgtgtggactaagtcttaatccacgttcttggaatctgttgaacacacgttatagctaattgggccttagtgttaggcccaacttattgctccataacagttgccccccagcccggttatcaagtaatcttggtgaccgggatgcattttatcaatcgcttctggattgtcaccacacacgctgttggaatcggagttgacaaataagtcgataacagaatcattcatcaaagctagttgcattattttgtctttcccgagtagcaaattcatccggatatgccatacccgactaggatcattcagatattttaacacggctaggaatcctcctgatgcgattatccgtcgtctcggattcgcacaaaaatctctgattacgcttctctgcgtagaaatacactaagtaactttggtcgaacatgaattcccgagtagcatataatgtggatgacatcatattgatgatgtttgaaacaagatctttcgtatactcttccgtgtaaacgttgctcctccacatttttgggatagaattcctcggccacgtctgtgccaatattacttaaataaataccttctcaacgcgtcttccacgagaaaatgtactcgggtatgttaaacaaaggaaacgtctctgggtagccaaaatattttgagcaacgattgatttgccctatgtgcagtcggttacccttcctgtcatcatggctaattaatgcattaaagggcctgtcgtttcattcttcaagtaatcattgcgggctctgtgcttttactcatatgcccccaacctcaggtgcgcttttaccgacgtgtccttgtgtcgtttcattttagtggtggcggtttgttgagccgtttgatttcccttagcggttactgtaggttatcattatatttcaaattttttcccaaaatcccgcacttctagctatttctcctcctacccttcctttcatttgtcacatctatgtatttctccttctcatattttttcctctcgttctgaatctccttgaccacttgcttcaacttttggtactctctcctttcactaaagccttcgaatcgtttgccactccgttgccaggtattttctctttgctactttatactttctgcttcttcgcacgtgttagtgtttgtaatcacatcgttcccttcatctattctgggtttcgcattgttcttcttcttcctttttctgggtttctcatttcctggagtcaccatgaaagtgactcctgaggaggcgacggagttgtggaaacgttttggccctaggggggcctggttattgtttggtgttcctcttccgctgggggaaagcgagagtgacccccttcgcagccacactggaggttcttcctcctccaaaaaaccaaaagtttccgctgtacccaatactccaatcatccctctacagccgtattccctgggtgggtctaaacctgccggtgttcttccaccttcttcagtgggccaacctaccctagcctcgacccattctaaaccttcgtccattttgggccctcaagtttctaggcccataaacgctaatgacccaagggatccttcatcaggaattccttgtcgtcgttttaatcctgtcaccggtctctcttcttcttcttcggatgagacatcctcctcgtctttagatgacataatggaggttaagtatgacgcctgcgttgactgcgtttcgggggccatgtactatattcaatgtggttctgatgacgtcgctgactctatcttagggtcatgttggcataaccccatactctcgtctaccaaaaaaccccagccgaggtcgcacacccgtgtaggcgaccgcgacgttccggcctcggcctctcctaactttgacgtgccatctccaggtatgtgtgctaattcttgtttttatcttctttttgcgtaggtataatggatgtttccttggaggttatagacgaatctctatctgctgagtccgagtcgaacgtggctccatttctagcccttaagtttccttgggtcacctatgaagtccttagaactttttccacccttgagttagccgacatagtctcccttcccgtaggtaagcaggacgggtttgggatccgggctccctattcgggtgagcccatatgtgcctaccgggaaggcaatgatcccaacttctttttcttctatgaagccgtagtttctcaaataggagtatccttcccctttacttcttttgaaatggaagcattaaaccatctctgaatagctcattctcagctccatccgaatagttggggattcgtgaggaccttcgagctattttgtggagaccttgggatcccctgcacgattcctcttttcttttattacttctacccaaacacccctaggacgggcagggaaccgcccgagcgcaagggatgggtctctctccgaagtcaaagtaaacgtaaattgattgttccgtttacagactctttccgcgggtttaaagataagtttttcaaggttgctgccgctcccggtcagcgaccatttttccttcggggagaagaatccgatgacgtggagtggtcgttccctctgtattggtcgcgagatcattactgtgaagaccgttcttgctataggtttgtagaggagtcattatccgactccgaggcctccgccatctccatcgtcacagaataccttgacacttgtgggtcgcctcatgtggccgattatgttcgccgtgcccgtggcagttcctccaaatactgtaatcatgcttctctgtttattatgttcgttattttgtttgaatgttatttctaacatgtcttctattgatgtagttaacatggggcaacaatcaactccgtcgtcgaagtctacctccgatgccgctgccgaccccaagtcggttgagcccaagggcaaagggccaaccatggagaaaactcctgcccctcaagtgccgccgaaaggtcagaaacgtcctcctccatccttccgggtcgccctggaggctgataagaaaagggccaaagttcaaaacaagcctgcagcccctaaacattccgttcatcccacctcggcctcgggaactcccaccgttgcactcgctgtctctactgccaggatgcctactcctccgtcttgctcccccatccaacccggtcagactgagtctcaggctgtgtcgggtaacgtttggaaaaagggggtgactgaagagttggtcaagctgaccaagcctcctagctttcttcttgagccgggtgcccctgtgggcgacgagcttgccaagcttatccggattgaggagaacgcttatgagtgcgcctctttggtgcgggccttcgttaccgtgcgggaaaggtatgtattttaaataatgttaagtgtgtactggtgaattggcgagttcttactcaagtctgtttcaggtacggggtcgtggtggaagagaagaagaagattcaccaagagctccttgctactaaggtcgggctcgagaaggcaaaagaaaaattttctgctgaaactcgaaagctgaaggaggacctactttcggttcaagccatctcagcttctctgcgggctgatctgggccgagctcaaggtggccttgaaatttccgagcagaaaacggctcttttaacttccacggtggactctttgaaagccgcccacgaggaggagctggattctttgaagaaaactcttgcagtagccactgaggaatccttcaacaatacccttgaggtggttaagtttctaaaccctgacgtggccctcaatactaccgggatgcatttcatggcctatgtagatgagggccgtctggtaccaccttccgaggctgaagactcctctgttgcggctgctgaagaacctatgcaagtggatgatacttcatctttggctccgcctaccactgtaaatgccccgacgccgcctaatcaggacgaagagcctgccgccgacaaccaagctcctaactgaagggcccggatgccggtttgactttgtatttttcttttcattgatgttaggcttccgagcctagtacattgtttatttttatatcaatgatgattttattttcgagttttcatactcgattatcaatattatacgcgcgtaattttggttccaacgaccaattaatatatccgtattgtattatgagatttatcctctcacttgagttagattcgtaccatgaacaactccgctatcggatatgctcctttaccgatttgatcagaactggctagcgtatcgttcaaagctcttaaaatctactcggacaattatattgctaacaagacaatccatcaaaaaaggggagaatcattttattgataccggtaaatcataacaaatccgtaaaaatgagaaccatatgttccgagaaggtatctcagcccatactcccaattaaaaattacagacttggaatttacaacggcatatgcaactagtcaatataataataaattttgtactcggagacaggcgttccgagcacaatcctagtagcacgacacggtctctgacagaaaaccatatgaacccggtaaacggagttggggttcgtactttccgtaaaagacacttgcattgctttattaacggaatgtatcctcgattaaagagaaccatatgcacttggatatataacatccgagttcatactctcaataaaggagaaatccacattcttcaattaactataatatttcttcagtttgtccgcattccacgttcgcttaatctggacgccgcccaaagtttcgagggtatacgctcctttatcaagcttttgagctactcggtaaggcccttcccaatttgccgcaaattttccgtcacgagcattcttgttcccaatgtctgcacgtcgcaataccaactcggctaactcgaactgtcgagggactacttttctgttgtaagcgcgagccatatgctatttagtccgaagttcccgggcatgggctgctacccgggtttcgtcaatgagcgctgattccagtgccaaaacctcgctatttgcttcctctccttcctttaacacctgggttcgtcgccatgattgttgtccgacctcaactggtatcatcgcttcgcttccataagtcattcggaagggcgtttctcctgttgatgattggacagtggtccggatcccccagagtgcatagtacaactgctcgatccaactggttccggcgtcgtgcatccttttccgcagagcttctaggattgttttgtttgcggcctttgcttgtccgttggattgtgggtgttctaccgatgcgaatcggtgccggatatggaagccctccatcatttccttaaatcctttgtctgtgaattgtgtgccattatcggtaatgacctctccgggaattccgaacctcgagatgatgtttctttcgaagaatctttgtacccgggcagaagtgattgtcgctagcggcgccacctctatccatttagtaaagtagtccactgcgactatcaaccatttcatttgcccttctgccggcttgaatgggcccaataaatccatgccccatttgaaaaaaggccatggcgccaagatggattgtagtgcctcgggcggcgacagaattcgagatgcatgcatttgacaattgtcgcatctctttacgtgttttgctgcatcggctcccatggtcggccagtaataaccggcccggagtgctttccttgctaaggctctcgcccccatgtgttgtccattaataccttcatgtatttcggacagcacatagtcgacccgacccagagctacgcagactaacaaggggctgtgtaaccctttccggtacaaatcaccgtcgattactgtgaacatggaggccgttctaattagtttccgggcttctaacctgtcttccggcaaagttcatttgtccaaataatcaactatcgggcgtctccaatcttggtccgcggtgatcatcattatacatgacggctgcactacttgttgctggacgacggtacggttattccccggactcttagtacttgctaattttgacaagatgtcggccctggcgttatcttctctaggaatatggttgaccttcacctcgtcgaattcggaaatgatttcttttactcgacctacgtattttgctaataggggccccttcacctgataacgaccttcaatttgtgccgcgaccagctgcgaatccgtgtacactttcaccttctccgctgcctgctcccttgcttgtattagcccggcgatcagtgcctcgtattcggcctgattattcgacgttgggaaatttaattgtaacgagaattccgttgctactccgtctgggttttcgattatgatcccggcaccacttcctttcttgttggatgatccatctacgaacaatgtccaccaactccctgtttccgggacgtgaggagtaagttctcggacgaaatctgctagcacttaggacttaattgcgtgacgggcctcgaacttcaggtcgaattcggataattgtactgcccaattggtcatccgaccgccagatccggcttatgaagcacttggtggataggctgatttgtccggacaatgatggtgtgactttggaaatagggacgtaattttttggcggccacaatcaaggcgaacaccaacttttctaacttctgatatcgcagctcggagtcgcgtaatgcccgacttacgaagtatactggtttctgttttgcctctatttctcgtactaggacagcactgacggcctcctctcctaccgataagtacaacaccaaaatttcccctgcttccggccttgatagaaccggcgggcttgtcaaggattccttcatgttggagaacgcggcttcgcattctgggttccattttataatagcttgcttcttcaaaattttgaaaaatggcagagccttctctgccgacttcggcatgaaacgtgtcaatgcaactattctccctgtcagctgttgtatctccttcttagtagtcggaaatttcatgtccagcacggcacgacatttgtctgggttagcttctatgtctctatgtgtcaacatgaaccccaggaatttcccggctctgactccgaaagtacacttcagggggtttaagtgaatgttgaattttcgtaagcggccaaacgtttcgtccagatcgtcgacatgcttattgatttcttcggttttgactatcatgtcatcgatatatacttcaatattacgaccgagctgggattcgaacactctgttcatcatcttttgatacgtggcccccgcatttttgagtccgaatggcattacattgtaacaataatttgctttatcaccaatgaaagccgttttctcttgatcttccggatgcattgcaatttgattgtacccggaaaacgcatccatgaatgataagactttgtacccggaagagctatccgctagttggtcgatattcggcatgggatatgcatccttcggacatgtcttattcaggtccgtgtagtccgtgcagactctccattttccgttcgacttacgaaccattaccacattggagagccaagtggtgtactggatctcccgtatgaaacctgcttgtagtagttcttcaatgtgagcccgcaatgcctgcgttctttcaggccctaacttcctcttcttttgctctaccggcttcgaccctgggtacattggcaacaaaaagccggatctattccgactatctctgatgccttccatgcaaaaacgtctcggttccttttcaagcattcgatgagcgctaccctatgtccgggctccatagctcgcccaatattggtaacctgggcgtcatcattgcctatctgaacatgttccacttcttccaccggctccggcatccattcatctgactctattcgcatgtccaattccaccaaatttacttgacctcggactttctgatgcctgtttgattcctgggatactagcctgtattcggcttcactttttcgaactgtgtcataataacattgccgagaatccttttgatcaccacaaactatcaccacctgtccgttgccgccgacgaacttgagtttctgatgcttagtagacattagaatgtcccatttgtgaatagtgggtcttcccaatatcatattatattgggactgacaatctaccacaacgaattccaccctctcagatctgaaagcttccttagttcctaaagttaaccgtaaatgaatggatccgattacattcgtattccccccattaaatccggttagtgtggttttgcatggcttcaagtcttctatgcttagattcatctgtttgaacgtgtgcaacagaattatgtcggcggagcttccattatccacaaacatttttcttacttggcagtttccaaccattgctgttataaccaatccgtcctcatgtccgggtactactccatccatgtcctgcctcgtgaaatacaggagtgggggttctggttcttctatccgggtcttaaacttaggctgtgctcggatagataacacctccttcaaatacttttttcgttgattggcagtatctcccccaccccccatggctcccgagatgacgttgcattcgaactctggctccgggaatgtatcgtcttcttcccgggctttctttctttcatcttttttgtctgaccggttctcatcatcccttcgtttgttcttccgtccctgagtcttgatcacgtattgtctgagtctcccttctcggacaaacttttcaatcgcgtcccacaggtcccagcactggtcggtagtgtgttcgggcccattgtggaactcgcaatatcgtgatttatccaaccctgcccggttgaagcttgggcgcggtcgttctactttcttcatctccgtgagagctacttccttccagatttgtgagcgggagacgttcaaaggagtgtatttgtcgtatttattttcatacctccccgatttggacttcatgtcgttgttccgggctcaattttctgactggcccctattcttcgggggcagacttcttctatcattccgctccttccctcgtcctggattattcgtaatttccatctgctcgagctccaggtacttctttgcccgggcactgaactccgttaacgacttcactgggtctttataaatggatttagcaaaacgtgaagaaccattcagcccggctgagataagataaacatggaccttttcctcgagcccgtgcacctgtaacgccgcttctttgaaccgatccaagtaactctgcaaagtttcgccgggtagctgccttattcttcctagagtaaactccgactttggttgctttttgctagtcgcgaaattcaacaagaatttctgcccgaaatcttcaaagttcctaatcgaacgcggcggcaatgtgtggaaccatgtttgcgctggtccagtcaacgtcatagcaaaaatccttgatatgatgggctcttcaatcccccggacacacatttgcatgtcgaactagtcaatatgtacctggggatcctgtgttccatcgtactttgacaaaaatgacccatcgaaatcctccaggtaccgagcactcactatttcgtctacaaatggactgttgttttgttgtccccggctatacttccgacgataaacgggtccttctctgccacgtgtgaccagttcccccggcctgtcttgttctactggtatctgattgacccgctgggtttctgctttatctacccggcgtgtttggtttgcatcagcctctactcgactatactaatttccgccgacgtcaactcggttgggcggagtctcatttctgttcactccatccggtgtcggctcctgtacccgggcttgttcccgtgatggttcttcagtccgcacccagtcttcttcctgctcggtatttcttagctggttcaaatgttcccttaggtcttgtgcaaagggtggtgttccctctgcgcggtttgaagcctgtacttgctccactattttctgccatttctgttccaattgtgccatgcgttgcatctcggcacgtctccactcctcgtttcgttcttccatctgacgtgtaatattccggatatcctcttgcctctgaatgttttgtctcctctccatgttctcaattcgacttaggattgaactgagagcattactgacgagctgtcctccgagctcctctgcctgcaccattcttctcgtcgagacttcccttcgttgatcagtctgggctggagaagaagcctcatcggagacaacttctgtgacatgtacttcttcttgtcgcaccacgttaggattctctagcatgaacatttcttggtttggcatttcagaacgcggtgcaggttggctgttccttgtattcaccattgctgaagcgtagcgtgggactcaaattttatcgtccccacagacggcgccaatgtttcgtatatttccagaacacaactgtatagcacggaagtactatgtgtttgctgtttgatcactctaactctgcaatttcaaggatatcaatggagaatgataccttgaagcaaaagatcacagagatacaccaattgacgtggggtgtatgctctgtgtaattaaaagagagagttagaatgaatgtgtaccttttaggtgcttataccgacgtatttatgagcacattaccttgccattggttatacgaactgcttatgaactgcttcctatatttccgacctcaatctgcacgtttgtaaccgctcgtgtggactaagtcttaatccacgttcttggaatctgttgaacacacgttatagctaattgggccttagtgttaggcccaacttattcctccataacagtactcaattcgacttaacttaacgattatataggttttaacaaagtatttgtaattttaacaaaatgttgaattcttaagatcaaatacgattcatttcaatatacaagtattcgaacttgcacaaaaagcatttatagatatagattcgataatataaaaaatacaacaaatttagaatactaaaaaaaaagagtcatatatagaaagataaatgcgagaaagtaaacctaaactaatcaaaaagtaaaaagaaagattgggtcaaaacatacatctttccataaaatctggtttccacgagttcggcataattggtaatcaagagtagtgcattgttcaaaaagccaatcaaaattacataaattcgtctattatagaagcataaaaataatggataaataaacgttctaaaaacacatgtcttcaatgatgtaattggctaatcaagatcctgacacctatgctttgtggttcaaatttgacaaagttgtaatagcgctcatgatcactagcttttctcgatctagctaatgaataacttttgtaggactttgttttagatcgagaaacatattcttcaagatgttgaactttcatcagtaaatatcctttcaacaatcgaaaacatattctcgattgtttaaagtgattcttgaataaacatccctttatgactcaaaattatctcagaatgttcatcataaacatcccttctttactcgaagtacatatatattcttgatttcacaccttatgcaatccacatgaccctcttctaatgaattgaaattatattttcaagcatatttataatgttgcatgcttcaaagttatttataattgaaaatattcaatcaactttccatgtaggaaaaaatttctcaatgaccccaattcctacaaaggttaaaactctaccaaaatctctcataatcgactcaattatgctcacaacacatttaaaagcacaaatctaatgtttgtatctccaatcaagtatctttagttaatttttcataaaggtaattagataagagaacccaattgaaaaaaaaaaaagtttacaggacccgtaaaataattatcccttttttaatttggaaaaatttaatgttttgattcgaaaattttgagcagaaaaaggtttaaaataatttaattgattgaatttcttataccaagtttactttgttttaaaaatgaaagaaattaattggataaaaaaaccttaagaatctcaatacgcattatctaaattaaagagagaaaaatttcaattacgtctaaaaaatggattcatgaattaattatagagatgcatcaacaaaaaggaaaaataaaagacaatccttgaactaagcaacaaatcagcatgcttaatgaatagtatcacagggtggaatatctactttcacaactttctagcttcatgcttttcataatttccaaagcaagatcacaacactggccaatcgtttcttgttactagtttttattattttaacaacccaatcaagtctgacccattaatcactaccacatttcgataaaattggagaaatcatcagaagagaaaacaataggtaaacctaaattaaagtagtaaaaaaataagatataaaatctgttgcctcactaatgcctgcaactaaatttataagcctcttcggacgtgatgcatgacgcaaaaacaaattaattaaaaacaaattgacaaaatcaaactttgttgctaatgatttgaatatgtttattctcttggccttgggaaaaagaaaacgagacatcaggcatcaaccatgcatcttcttgattcatggcccacataattctcatagccattctctactttcatagaaaaaattgaccaggtcaaaaggttgatgtgcaatccactttcccttggttttaattcgattctttcaatttgaacctgacttgtgggggcttttgttataatgtatgctttttcttgaaatattgaggcaaaaaggagatcgttggttgagatccttcaaagttgaaactatataccaacttacaccaatggatgctcttaaatgtggctgtacgtcagtgccatagggaaataaaaaaaatcgtcaaccgctgatttcacaaaaaggaagtacctaatgtgattaaatattgtgcttgctttcttcgatataagctttattgtttcctcgaatgtcttttatattcttgatatttcctacacgcatcaaatattgcccaagacaatttattttatataggtacaaacaaagtgccttaggacatggttactgaattaatttagttagaaccttaatataaatattattatctccaagaccatcttattagaatcaatcaggcgaatgatgattgtttttttaatccataatattaatgtgaaatatccgttaatttctatcagaaaatatcttctttcaatcatattatttaaaaattttatttaaagaaactacatataatatcactcatatcaacgatttgtttacaacaaatgataagatgattgatgaggatgttatactagttgaatgaaatattatcacataatattagatatgtctaacccttgatttggcagtttaaccgtttcttgattttatgaaaaatattaagtgttgccactttggccgtttgcgtttagcaaaatcacatgtatgcatcaatcagacatacaaaacagatgaactagaactaatatcaatcaaagaccatataatatgagtagtgattatctcaggacacttagaaaacatgatagacataaatcatgtgagagtggaagagaaactctcacatgtcttaaaatacttataatgttctgattttttttaacaccataacaaatatatctaagaatgagtttgctgaatgttctggactctaatccattgaagggtccaccttaactgcttcacctgttcttttgttttaaaagatcctataatgctctatggcaaaattatgtttatagtaaaaccattgacctcattccctaaaaaaaagaaccattgacctcaaaatccttgttaatgatttctcttgcaatttttcttgggtctctttctacttttggtgtatcctctgtttgatttactctccttattgcagtttctaaaaaaattatccactcatacaaagcacttaagatgagtttcaaccatctttgtgaccataggtgttatcacatctttctttctaatgtattgatgtgtaactttcatcttttccagtacgttcactcatccaccatccaacatagcaattgaataaaatttacaatgcaacaattgaataagctttttatctaatggatttatatctgatacgtgcattcttttctaaatcctaaaactttaacaattacaaagaaattttcctttttgcaagctgtaactatacagaagcaaaaacatcagaatgaataaaatacggtccatagtatttaaatgattataacctggcacactattgcttcatatatataagtatgcaaatttgggcaacagctaacaagaggacctgagaagcttccaatgaaattatttctatgggaagcgttgctactcatccaaagcctcataggctaagacatcctgctcatatgggatgagctttatatactagacatttgtctaatacacccagaatgaacatcgctttataacatgcttcatacatacggattcgtaatctattaggacattacagatttgccaatccatacggattgggtcaattcggaagtaagtttttttctaaagttaaaatgtatttttcaaaatgatttaaaataatgatacatgtgagacctttatgttattaacgcggcactctaaacactgagctaataagttaattatactaaaaaataattaatattaatacatataacactaatttttttaatgtatatttaatacacatataagtttacatagtaaattttataataattaattttgatctaataattaaagtattttttacatataaaaatcatgatttaaataaaaatcataagtttaataaattttttatttaaaactataatttttatttaaatctatgattttatatgtaaaatatactttaattattagattaaaattaattgttacaaaatttattatgtaaacttatatgtgtatcaaatatacataaaatttagtattatatatatcaacattaattattttctagcataattaacctattagctcagttggttggagttaataatgtgaaggtcgcaggtttgcatgcaccattcattatgagtgtattaaacaaatgcttagattctattaaatccaaaatattagtattttaaaatgaaaaatgatatcataacaaacgggttaagtaccagaaacaaaatgctatgaaaacaacgattaacttagcaataagattgccacaaagtcttaaggaatccatgtgattttaagactaagagaatcacatgaaaaaatcatgggcactctttcttccagtcacctaagatacatcacttaatatgattttgagttttgacatcatgttataatatttgagctcagcttcccactgccacttcctaataagtaaaatgaaattcactcactataactctatcagaagagaaacaatagctgatggggtttattaaccctgttaatccagaagaggatgatgtaattgaatcaggaacagtgtgtgaacggaagagcaaaatgaatgcagttttggttgagttgtgccataacaggagaggctatggtaactggtaagtgtctggaaataaaacgtaaacccaacaatgtggaaaatatacttcaaagtcacaaactccccataaaattccaggttgcttacccctttttatacactgcaaaacaacactaagtttctgtaaaaggcacccttgttacaactcaatccttgcacttttctttggtaccatgtggctgaaacatcaaaacttcagtaacctttgaacctgaagccaatccaacatccttgccacactcttttctggggtcattatctgttgagagccttattgatacccatgtgagacataataagacaaaaatccaaatgcagtcaggcattcaaggaaaaatgaatttcaacaaaacccatccttaagaatttcacatgacatagataccatgaaaacttgaagactcacccttgttaataatttagttaatgtagcatggacataccacttgctttgaatggtgaggcaaacaattgtaaaaattaatgtccttggaatttccttcaatatggttttctagcatgaagcatcatgtcttttccaaaactttcaagcttttgagcattaccagtaatctccacaggagcacgaaccattggagaaatgatgaaacctgctgatatctctgactatgatgtttctctctgtaaccttagaaataaattttaatgcagaatgacaatcagagcaaactcttaagttttttttgacaatgattggcatcccagttgggcaggttagtaatgaaaacgccacggcaatcctctcgctgtgataatgaagaagcttctccttcaaattgtcatccatgtcaatgagaactgattctgtttgaggaacatacccgattcgctttatctgatcaagaagattatcaagcttttcataaatttctttcttttgaggatgagaccagtcttcaaccccaaacacatgggttttatttctaatatcaacccaactataacctggcaacttattcatgttgccatctttaatcatcttcctcaaactttgtacatcttcccattgtttttcttttgcgtaaatatttgaaagcaaaacatgagccccactattttcaggttcaagcttcatcaatttgtctgctgcaaatttggccctttccatgtccccatgaattttacaagcaccaagaaaagaacaccagccaaaagcatttggttcaaaaggcatgttgtttataaagtcttctgcttctttaagctttccaggtctacctagcaaatcaataacacaactgtaatgctcttctttaggaactaccccataaatcttctccatggaactaaagtagtttaacccgtcctcaaccattcctgcatgactacatccttttaaaaggttaacaaatgttactgcatttggtttcagtcccctgtggatcatcccattaaaagtttcaatggcatttcttcctaaaccatgctgagaaaaaactcccactagtgtattccatgctatttcatcaggattttcaatctcatcaaacaattggattgagtggtcaaacaacccacactttccatacatatcaactagtgttgaagaaacaaaatggtctcttttaaagttgaatttgacaacttgggcatggagctggctcccatgttctagctttgcttggttagcacaagccttgatcaagctggtgaatgtaaattcattgggttcaattcccctcctccgcaagtcaacaaaagtgcttaaagccttctcaatttgatccatctcaacataaccatcaataatagcagtcaaagacactatacttatacaatcagaatgcatttggaagacatttgaagcacttaccatatctccagactttgaatacatatctgtcaaggcatttccaatgaaaatctcgtattcgaatccaaacttcaaaatggttgcatgaagggacttcccaaaactagaagctttaagtgcactgcaagcactcaaagtactacaaagcacatgctgatcaataaaaacatcatcagtgaccattttcacataagctgttaaagctttcttaaaatctccatttttcacaaagccatcaatcattgacgtccacaacactgcatccttacaaggcatttcctcaaaagctttacatgcatcagacaactccctgcactttgaatacatatcagtcaaattactacccacaaacaattcacagccaaacccacatttgacaacgagacaatgcacctgcgtaccaaactgaattgccccaagtgaggtacaagcttgaagcacacttgaaagtgcaaattgtgtggctatttctccttcaatcctcatttgaaaaaatgaactcaaagcctcttgaaacctcgaattatgagcaaacccagtaatcattgatgtccaagaaaccatgtttctctgtgacattttgtcaaacagtttgatggtgtaatcaagctctccacatttggaatacaaattgaggaagtgattgctcagaaaggtgtttggcaaacaccctcctcggatcagcatagcatgcaactgctttcctttgtttaactctttggttcgtgcataggtttggataaggtgagccactgttttggtgtcacttagtttgtggccaaatccaaaaagattctgaaagttaaaatgccaaatcagagaaaaattatgtgaacacaaaaaagaaaaattgaataaatggagaacaaatagatatacatacacacatactaaagttgtaagctaatcccccagaaaaaaagagttattatgctgcatttctctgtcatgattttatacctttccatttgtaataattaagagggccgatagtttcaggtgtgaagttttaacaggaatcatgtcatgtaaaattgttttgattaggatatgtataataataaaaatttattgctgtcaaatgatgtcaattacccttgaacacatttcgctggtttgatgctttgtcacatgctgggtgagcgtgtggaacgttttgaacacttatagaacatcactgttcatttgttgacgtgccttctgttgaaattctgatttctcgcaactttatatttatgtaatcgatcaattatgttattttttttccttttttttcttttttgttttccaacatatcttctccgttggagacaattttgtttgaaacatgatgggtactaaatatgaacacctctttcaatggcaatttgaaccttgattaattatgttgtgagagattagtccctttcactatgatctagatcttgaaatgtttgtctttaacataaatgcgaaaagggttaaaccaaatggtttgaatcctttgaagctccataaagatgaactcttggacccatttgattatgaatcttttgaggtgtgatagagtgctcttagttaaatttttgtctatcatttttagcttatttgacctcttttgaacttttattttttcactctaattcagtttttggcctaggcaaggaagtgaacttaattgttaattgtagtgtatttttggatttttgctcacttaacatatctgacttgtgcagggcctatagagtgctaccaatctccgaatggagcgttctaggagtccctggaaagataacaaaaagatctacaagtttgatagaaataacccgaggccaattctgtcattttgagggtcattttgagcttcgaagttagcacctctgcacttgtaattttgggctgcaaatttgattttcataattgtaaatagtaaataattagattgttgggtttgtttatagcccattctattttcagaaattagtcattaatatattagtgactttagtgaaaacttacagaacatatttttatattcaataaaaacagtttttgcttttctttcttttagtttttaggatcaaactcttgttctttattttctctcatttgttctttattgttcttcatcttcttcattttcatcttgctatccttttattttattgcactcatttcatggggctttccttggtgatcatcatggaaggccaaatcattaatcaatccaaggatctaactcaagcaagagaagaattggagttccggttcggtatttcgaattttacttgaatgttaaccttcttcttcaatttctattatgttttcatgattatgaatgcatttaggattgaaagtgaattaggattatggattcatgtcttaatttcaattgataatcacaagattaattgaatggtatttcagttagggttgtggtttcaatcaatttaggagtagaatcgattgaactgcttctattgagattggatgaatgttcatgttagaatcaacttatgggaatgatgatgattcgaaaagcttgggttggtgaattggattgatgctttctaatctgttttactttactccttgataatcttgttaatttctgcattgttctttaattttagtttgtgttcttgcatgttttactttacgcataccaactattcgacaaaaatgcccccttattattaccaatgatttgaagctagaaccatattgatcgtgtctctgagtcgacctaggttagctctatgctacagaattagcttagtaaaatttttttttgatgcttctcgacaaagcaatatcaaaaatggcgccattcccacgctaatagcgctagcgtaagaaaaaaaagtttttagggttgttttagtgctttttattatcctttgtgagttgcattgtgtatgactaggtccacatcaagtgaattccattcatttgatcctgagatagataggacatttcatagattaaatagaaaaaaccttaggttagatgattttgatagtgtagttttagacagtagcatagcgtcttctgacgttgattttgattctacttctacttcttctacttctacacatcttgatatcatggctgataacaacctaactcttaaggagttagctacacctgatgttgtttaccaaccctggtgtattcaataccctgagactgaggttagttatgaactgaaatctggactaatccatttgcttcctaagtttcatggacttgctggtgaggatccacataaacaccttaaggagtttcatgtggtgtgttccaccatacgaccacatgatgttcatgaggattatgtcaagatgaaaacatttcctttctctttggatgatgttgctaaggattgattgtaccttcaaccagatcctatcaccacttggacaaacatgaagataaaattcttggagaaattcttccttgcctctagaacaacatccgtcaggaaggaaatttgtggcataaggcagttccctggagagtctttgtatgagtattgggagagattcaacaagctgtgtgctatctgtcctcaccatcaaatcagtgagcaattactaatccagtacttttatgaagggttgatgtggatggataagagtatgatagatgcagctagtggaggcactctgatggacaagaccccttttgctgcaaggcagttgatttctaacatggcagctaactatcaacagtttggtgctagagttgcaacatccaaggttgcaaatgaagtttttgtctctctatggttgctgataaccagagattggagaacaaattgacagagttgacgtcccttgtgtggcaacttgccattggtcctggtccacaacaacaacaatccttcagacctccaaagcagcacttcgaccctaccactgccaaataccaaccttccacattcagacaacagtcacagttccagcaagctgcacctacacctgcacaacctgtgcaagccacttctgcaccttctttagaggacttgatgaagcagatgactaccaacaaccttcagtttcaacaaaatgtcagtgctaacatccaagacctccagactcagattggacagttagctacaactgtcaaccagatgcagcagcaaggttctagcaacattcctgcacaaccgatgattaatccagagaatgtgaatgccattaccttgaggagtggcaaggaacttccagattccacagttgttagtgctaaatcagatcctgtagaggagcattctgtttttcttcttgatatcattgatgttgcagtagatagtgtagatatttctgatttactttctgatttttcttttgaattttctaactttgatcttgtttcttgtaattgtgtatgtgatgagtctgctgttatgtgtagtatttgtgcggagatttcctgtgcacactctgattgtgttgcaggtacaaatacaggttctgagcatactatcccattttcctcagcctctactctttccttaccttccactattcaaccaccttccttggagccgaagtcactacatgagcacctcaagtatgcatatttagatgatgctcagaagtttccagtcatcatatctaatagtttgtcaatggagcatgaagaaaatttgatgcatgttttgaaaggccacaaaaaggccatggacacttgttgatcttcttggaattgatcctcccatctgcatgcattaaaaaaattatgtttgggatgtgtctttaacgacactttaggagtttccttttcccttcttttatttgttgtctctttattgcatttcttgcatgcttacattgaggacaatatgcatttcaagtggggggtgaatgatcttaaaaatctgtttcttttgttgttttctgttttttgtctgtttatgttttgttgttgtctatttgtcattgtctgttattttctgtttgtctgttttagttgttgagtctgtatgtttttgttatctgtttctactgtttctgtttgttgctgtttttattgaatttaggcactttttcatgtttttcataggatttccaacttgtataaattgtgagaaatgttaaaaagttggttggattgagaggtttcatacttgatgtgaatcattgttgtaattgttgaagtgataagtatgcttgagaaatagagtttaagatgaaccatgtgtggtaaaattatgccttgtgagtttttgagccttgtggatatattctttcatgtgtgatttcacccttgtgctagattactctatgttttgccttgcctcttttgacattccttgttgcacatgctttgattgagatgatttaggccttctttcttttagccactagccaaataaacctatccttgtgttgatatccatcgtcactctctttgagcctctagccttttctttcttgtttagctcattaaaaaactaaaaaaaaatgatggaaaaccatgttaccctagctttagggagaaaaaagggctttggaattgttttgagagtgggtttcaaacaagtgtggggtttttgtattttgttttgttttgaaagagaagaaaagaaaagagaaaataaagagttcaaatagaaaaagttcaaagaaaagaaaaaaaaattgtgtataagcaaagaaaaagaagttcaagcaaagggatatatatatatatatatatatatatatatatatatatatgcaataaaagttgttatggttcaatttcatcattgtaaattcctttaaacttcatctctttgtttctacctttcttttaatttgttggcttgctccccattgcccctcttttctcttaagttttagcctaaatatccttttcttatccaccttttcctaagccattcattacaagctaataaagtccttttgatcttttgatgcatgtgtatttcaagttgaatgaatgagaggtttgtcaatgcttggatgtgctagttgcatgtggtgtttgaatgtaaatacaagccatacacatcatgtgaggttgagtgccaccccttgagagaattctatcaccttggtgcattcttaatcctaaacttaactactttttcactttgcactttgtgatcatgttttcatggattgtttgttacctcaatattattcttccatctttccatctctcacttttgagcattgttgtgatctattgaaaattatgtatgccttgttcataccctttctttaaatttttggtatactttagtttgaatttttctcttagtttttttttttagttttgcccaggagtgcaaatgttcaagtgtggggtattttgatagagtgcttttagttaaatttttgtctatcattcttagattatttgacctcttttgaacttttatttttccattttaattcagtttttgacctaggcaagtaagtgagtttaattgctaattgtagcgtatttttggatttttgctcacttaatgtatctgacttgtgcagggcctatagagtgctatcaatctccgaatggagcgttctaggagtccctggaaagataacaaaaagatctacaagtttgatagaaataacccgaggccaattctgtcattttgagggtcaatttgagcttcgaagttagcacctctgcacttgtaattttgggctgcaaatttgattttcataattgtaaatagtaaataattagattgttgggtttgtttatagcccattctattttcagaaattagtcattaatatattagtgactttagtgaaaacttacagaacatatttttacattcaataaaaatagtttttgcttttctttcttttagtttttaggatcaaactcttgttctttattttctctcatttgttctttattgttcttcatcttcttcattttcatcttgctatccttttattttattgcactcatttcatggggctttccttggtgatcatcatggaaggccaaatcattaatcaatccaaggatctaactcaagcaagagaagaattggagttccggttcggtatttcgaattttacttgaatgttaaccttcttcttcaatttctattatgttttcatgattatgaatgcatttaggattgaaagtgaattaggattatggattcatgtcttaatttcaattgataatcacaagattaattgaatggtatttcagttagggttgtggtttcaatcaatttaggagtagaatcgattgaactgcttctattgagattggatgaatgttcatgttagaatcaacttatgggaatgatgatgattcgaaaagcttgggttggtgaattggattgatgctttctaatctattttactttactccttgataatcttgttaatttctgcattgttctttaattttagtttgtgttcttgcatgttttactttacgcataccaactattcgacaaaaatgcccccttattattatcaatgatttgaagctagaatcatattgatcgtgtctctgagttgacctaggttagctttgtgctacagaattagcttagtaaaattgtttttgatgcttctcgacaaagcaatatcaaggtgtgtgaatcttgtctactttccttaaggggcgtgaattagctgaaaggatcttataattagggactgagggagtatctcattcaccggtcaaggtgagatgactagtgattgtttggaattaatccatagtgatgtatgtggacccctgaactggcctgctagaggctgttttctttgtcacatttactaatgacttgagtgttgaatccacatctcttgttttaattatgacaaaccattaactatgtgcattgtaaggatgatggaatatgtgtgatgactaataaatctgctaagtgttttagtgatacatgtgcattaaaagaataaatgagcaagcattctgatgagtttagaacaagctcagaaaaggatgtcttagataagctgtcaagagtaaagcctcagaagaattgaatgaagtccatctacatgatgacaattagtgcttccctctaagtactgaactttgacatagtgtaaagacatcaacaatgccttactaagaagagatatcaaaggctataagagctaacaacatcataatgaagttgtgtcagagtcaacattagaatgatgaaggaaatgactctaagaatgtgaacttcataatgatgtgggcctctactccaacaactatctagggatgttaaagaagacttgaagggagctttgtgaagactgttgaagctatctagagagagaaaactcaagttgcatctttgtgtgagaaattttcctgtgttgcttcaacacctcttagtgagagaaagactccttctgcatttctgttttgagtagtaatctataataaatagaaggacattttgttatttccatagaggaaatcccttgtataaaagagaatttgtctttatgcaatgatacacaaaactttgttgtaaaagtctcgcaagtggttggaaggtgaaaacccagtgtgttggtagtctagctattagcaggttgtgaaaatccagtgtaaaagtcctgcaagtggttgtcaggttgtgaaaatttaacgattttaaccgatctaataggtggttggttgtgttagtgaaaaatctcatcttgaaggataagaactggacgtagtccaaggttgggttgaaccaatatagaaatcttctgtgcatttttttttcatttctcctttttactgtgtttattttgcatccagatcaaataaatgggttttgaacaacaaagtgttttcatctaaaccttttcaattaaacaagcatactgaaacttggttttgagctgctaaaaatatcttttccaaaatctattatattttacattctgagcttataacagttcttcaatctaaactaatattttctgaactaactcagaatcaccaaattttacaaaaaaggattctaagtttgtgaaaatacagttcaacccccttcttgtgttatttttgtcacttcattcagtagataagaatttgtgtatcttatgaagcataagtaagaaacctttgaaaagttcattgagttcaaaaaataggtagagcaccaactaggcaagagtattttaaggacatatgatcaaatcgtggtggtgaatacttaagccatgagtttgataactagataaggaagtgtgggattatatcttaactcattccacccagaacaatgcaatggaataatgtgtttgagaggagttatcaaaccctgttagacatggtacgatctatgatgagtcattcaaacctctatgactctttctgcagacatgctttacttactattgctttaatttcacacataatcatgttttgtctaaggcgattgaaaagacaccatatgagatatagatgagccgaaggcctagtacgtcttttatacttacatgaggttgtcatgtttatgtgaaacatatgatttcaaacaaactaaaacccaaatcagactaatgtgtctttgtgagataccttaaggaaattaaatgatattatttctacaacactttcgaggacaaagtgtttgtccctaggactgaagtattccttgaggaagaatacatctccaatagagctagtgggatgaatgtagagcttagagaaatctaagtgacacaaagtatcgatccacttgcaatggaacaagaatcgacactacaaagcattgtggaccatccttcaattcaattggcacaagagctgcataggtcgagtaagtcatgtcactaacctgagaggtattgacttatgctcactaggaaggtgatgtgctgctcaaggatcaagatgagcctgtgacttaccaagaggccattcttgagccttaatatgagaaatggcttgaggccattagatttgagatgtagtccatgtacactaactaggtttggaccttggttgatccacctaaagaggtaaaatccataaggtgtaaatgggtcttcaagaataaaactgacatggatggtaaggtgagtacctttaaggagtggctagtgacaaaaggtttcaagaaagttcatggtataaactatgatgagactaagggtgttcatgggtttgggttaacttgtgatctaatcggactcaattaagacccgatcatatatgattgggtaatgagttctattttttaactcgacccaagtcgactcaactcatatcatataattaactttattatatataaattaattattaaatgtaaaacacattaatttttagtttactttgttcattaaatttttaaattaaaccacccatgatttttttcaagttgttatttttatctgtcttaattttatttgttttttcatgttaatacaatacttctttttatataagataaaatatcgtattagtattaaaattattaattttattagtcaaatattatcacaatttaatctttttaagtgtatttagtcattatatacttacaaagtcacaatataactcataaaaaccaagtcaatagagtgaaatttagtactcataaattttaacctattttacaaaataggatacaagaaaagtcataatgtaaattatatatatataaatttattctagggtaataggctatagaaaatttaaagatgtccaccaaaagttggatacaaatgtccttatttatatgttattcaaatagttaaactataaaacttactaaattaaaatcgaaataacataacaaagcaaaacataaaaggatatatgatattacataatgagatttctaccgaaattatagcataactattgtccaaccatgaaaacattgccacaaaataaaaaaaagaaaataatatgtctaatcaaattaaggcataaacataaaaaaaaccattatttccctcttcatcgcattctttgtaattataccatcattcatgtttctactaatcctagctagttcaataaatcacaattgcatctcaacaccttcttattcttcatacttatggatttctttagcccttttgcagcttacatagtaacagtgacctttttaatgtaggcatggagcatggagccttcataaggggtttggttgttcttgttatgcatcttgcaattcttgcgccgcttggtgctattccaatggttcttgatggtgttctcagtcctaccaggcaacctctctccaatcttggaccacttgttcccaaatatcttatgggcttcaattaagagttggtcttgctccagggtccatgggcccttctacagaattagttatagacacaaaatgtgtggttatatatttgaaattgcagaggataattcacatatgtatgagagatgtgagcaatttggctttgcttgaatgcaagcgtcaggtgatgaaatgtataatgaaagtatgttacatatgaataaaagctatattgaaacaaaaacaccaattaatgtgttttagaaatcgtcatgaatttctctctaaaaaaaagccccgtcatgaattgactcaaaggtaaactagaaaagaaacagaacactgggtgcaaatttcaaaaaccgacaaaagctaattgaacttgtaaattcaagtgaaagattaagaggacgtgtcagaaaaagaatgaaatatttaaagacttttttaatataaattatcaaaaagaaatcataaaaactatttttataaaatattttcattatactaatacttaacttttttttactaaagtatgagtaaatatcaagctagaaatgtcatgtcacaaataaattaaaatcttgtataaaaacaatatttaattatatcaaatagtaaaggtatttagaagagaaaatgaccaataatattttttatcaaaaattagtcattgataaagttgatagatagttaaatactttgcattaataatatgaaaataaaaaaaattaattgaaaatattaaacataaatggaaaaaattgacttaattaaatttatgtatttcaataaacgtgtaataagaagaataaaatattggtaaagatgttacatcttacaaaaacaattaagtataaaaaaatattaaatgtctatcataaatattctaaaaagattattgctaaaacatatattgattaaatagaattaattgcatgtttatacatcttatttcgcacaaaatatatttaagttaaaataaattgcaattatatataatgaaaagtagcttcataacatttttcaatcaaataaaataattccaaaacttgtctttaattttatgattgaataattttttatttacaacatatgatgctttgaataaaaaatacattaaaaatttaactaactccataaaattttactcacatgaatatacattgtgagaaagagacaaaacaacaatatttttgtttgatttttttttttaaaaaatagactaaaatgtcagcttcgaagaatttgtcaaaaatgaattggaattttatgaaagtgttcgtaaaggattttttttatgaattttttttaaaaatatagttttagtcataaattaaaaaatgaaatttaattgaatgtatttttttattaatctttgaaccgaattactgttaagtaattgcatgtttatgtttagtttactacacaaatatatgtgctatttgtttataaaattttaaactttaatatcatatatgattgacccaaaaaaatgtgagtatgtttgtttgatatggaaaagagaaaaccttaatgtttggctgaagatggttgtaccatctttctctacactgtttaccaatcctaccatgcaataactttgcaatttgcgaccatttcttcagcccaaattgatttacgagttccaaaagtgcactgcaaacccataaattcaatttaactaaatatttacgattttttcagcactaataaatactgcaataaaatgaacaaaagaaaaattttcaatgaattaaaatcaaacaaatcatataaaatttaacaactaaatttatttttctttttattattattagaaacacaaaaaataaaataaaatgtgacaaaaaaaagtacatatatatattatatacaaatctttactaaatcttttagaatcctagaatttaagataaaattgtaattctcattattaattctggtcactattttattgctttttcataataaaaagagaaaaatcaaagaaagtcagaaaatggagaataggaaattttgtgcataattaagtgtatcatatatgcatgtacctatcttcttctggcgaccattgccctttgattatcttgtcattagcaatgttggaatcctttttcatctttactttccaattaatgtcctggtgatattcactcatcccccgttcatacacattagagagagaaagaggtgatggtgatttggaagaacaagcttcatatggatgaatcatggtgttttgtgaaaaatctagtatgagtttgtctttgtggtgaccatataaagcctccattttgttgttgtttggtgctaacgttacatggtggtgatggtgaatgttaacaaagccacctaggaaagacccatcacctaaagaaggggttggtatcccatacattggggtggtgatgggattggaaggactattcatcgcaaagggagggttgtgggataccaacccctctattttgttgttaattggtgctaaagttatagggtggtgatggtgaacgttaacaaagccacttaaggaagacccatcacccaaaacaggggttggtatcccatacactggggtggtggtggggttgaaagggccattcatcacaaagggagagttgtgagtaggcccattcatggcatggtcttgaaaatggtgaaaagtgttgttagggtgaaacatggcgggtggtggtggtgacggtggaacgagaatggagttttgtgctggaaacattgcttgagtttgtggcatcaagcaggggtttctagggaaaaggcttgaaaggtattgtggcctttgaaagcttgaatcaaaatccatgctgaaaagcttacaacaattgagtgagatatgaataagagagagagagtgaaagagtgaaattgttgtatgtgatgtggggaatagggggttcttataagctatagtggaccaacaaaaggacaaacagagtaagagaaaatgtcgaaaatagcccttgaatcataaaatttctatgactttgattcatagttagtgtgactgttcagtttctactttttgctatagtcggtaagaaaacaaatttttgttttccatttcttttatttttttctacgagtaatgaatgattcataaactcgtttatattaaatgcataattacttggtaggataactcttattccaattttttttagtaagaaagcggagttttgttttccatttattttatttttttaacgagtattgaatgattcataaactcattcgtattaaatgcattattacatggtaggataacccttattcaaattactttttagtaagaaagcggacttttgctttccatttcttttattttttttaaagagtaatggatgattcataaacttatttatattaaaatgcattattacatggtaggataacccttattccaattactttttagcaaaagcggagttttgttttccatttttttatatttttttaatgagtaatgaatgattcataagctcatttatattaaatgcattattatattgaaggataacccttattccaattactttttagtaagataggggagttttgttttcaattcattttattttttgagcgagtaatgaatgattcataaactcatttatattaaatgcattattacatggtaggatatgtaacaatccgcctcgtcgctactatatcactactctaaatgcttaatttcaatttgaaatgaaaactccattgatttgattatgaaaatgaagttaaattttttgcgataatacactcgctagacaacacacaaatacacacacacatatgaatcaactaatgaagagttgataacaaaacacaactctctcccaaaatatattctaaagttatcacatcggcttgacaactccaacaaaaagaattccctccaaagacacttactgttactcatctgctcccacgaatgaaggttcgtgatcatcacaggtaccaaccacaaggtacataattgcaagagtgagtttattatacaagatcaataaacactacatgaaaatgattaacaagaaaacaataataataaccacaatcattcttaatagtccatcaattcaacatgccctcaacaaacaagtcatcaactttttccataattcaaatcaattatgcttagaatgatgcatggacttgactcaaatgcaatgtggtaccattcgtcaggaaatagcataagcgtgtccacatgacactttcacttaggaaaactaggaagcaactgtcgaggtcatcctgttatgcacagacaacttcccctatgttgatcagcacaagtcttaagggagttccaaaccgagtgatatgcccccaaatactaacatttttcctcatgaaaagttacaggtactttattgacaaagtttataatatttccatgcaattatgaagtatgaaacatgagaaccatcaatgcactgactgtagatagttaaaaattctaagcaatccctttccctctccagggatatccaacaggtcactgcagcccccatgtacatacacaacatacatctatcatgatgacatcatcaacatcaacatcatctcatcttaatgtcatcatcaacatcaacatcgtctcatctcaatatcatcatacacacaacaataatctcatctcaatatcatcatcaacatcaacaataatctcatatcaatatcatcaacatcacaagcaatcgtattccacatatatatgtatatacatggaatgtgattaaagaggagaactaatatcatcatcaacatcattcctgggattcacattccccatgtcttcaaagaacacaaatctcatacaatcataatccataaaaccacgagactaatattttaggaaaaattctaaattaaagaggagaactacgatatacaagacaaactcttatgccccattaaatttaataaagaagtaaatagaagaacaaatataaaattttaggcagagtctcctttgtaattaaaacttttcccaaaaattctaataattacaataacaacatccttcacaatttcattcattaataacaaatgtatcacatctcattagttaaaaatacagtttttcttgaaaaccaatatgcaagggacagacatacatccctataattaggttcgttgaccccaactatggtatcaaaacttgtaaacaaacaataaactcccctcacctatctatatctctctgtcagctccttgcagcgtcgttttgagatctctcaggttcacgtcctttggtccaaacacagagctctatataccaaatcgaagacaattcagtatagattttgaagacaaggttaatattaacattcagggtccaatacccattcagttttaaaagggactaaaattgtgtttttggagtctacatcaaagagacgtcattttgaaatttcgatcacgccaatgtgatcgaggtttagtgaagatcatgaaaacgacatcaattttataaaaaaatcaacttttacatcttctcattttcaaaggaagtgtaagagaatccaataaaggtacccaaatcacaaagatactaagagagacttaaactaactaggagaatgcaatgaaatcatggttaccttgaagaaaccacgaaaggaggcttgagagcttcgttctctaacgaatcctcgaggtggattttgaagattttgctttagtttaagtgttgctctctgtgcggtggtctggtggcaagcaacgacgactcttggcggtcaccggtggtcgtaggtggttgatgaggagggttagggctttgggtgcgggttttgggaagagagagaaaaatgcattttctcacgttgatggacgtattttctcatgttatttcaaaatcgcaatggtcaaaacatgaagacatgggttgcaaacttacagtccaaatttaaaggcgatccaatggttaacgagtttgagattgtagttttaccaaagcaggttttgactcaaacttgaaatcatacatttccaatacatatcaataaaacttcatataacctaatatccataccaagcagttgcacaaagataattcacacaacacttcaactaatccaaattaatcaactaatcaaataacacaaaaaatatatcaaacatttattttcaactatcaaaatttcagggcattacaggataacccttattccaattaatttttagtaagaaagcggagttttgttttccatttcttttatttttattaatgagtaatgaatgattcataaagtaatttatattaaatgcattatttcatggtaggataacccttattccaattattttttatgtggcacataattaagttttattaaaaaaaattcataaattgaaaatttcaattataagttgtgtaaaaattggtttacgatcatatagacacacaatgctctaggatcatgtaatttagtaaatcacatattatgtttacattttttattctttgtatctctttctcaatgtttcaaataaagttgagtgtctacaaataatttttttgctaatacatcatcttttctatagtaaataatttttttttttaaaaaagaaaggagttatggtaaaatcatttagaagtcttgtattttaaggatggtttttggacaattggatctaattaggacaattcataattggaatggctctaaaattttcagggactagatagaaaaaacggcttgattttggtactaaagaactgaaatttgggtttgataagtaaaaattattaaagtgggtaattatatatatatatatatatatatagttaaaaatagaattttcttaaaactgggtaaaatttatataaattttgttaaatctaagagaatgaaaattaatgaataggaatgatagtcctacatgatttgataagatcaacatagatattatttgataataaaaatgtgtgaaaaattacattatggagtactagtaatatgagtgtagcagtaaaatttcatatacttttatcattatttatctaatatatatttaagttaatccatctatataaggacaagaaggaaagacaatgtagttttattttctatttaagtgattttaattgaaagactatgttcattaactttgttatgagaaacaaaaaaattacattatatttttttctcattgctgtgaaattgaagttattgtttaatttccacccaatattcttataggagtatttggggattttatttttcttcaaaatattaagtttcatatattttttatgactgtaattattaatcactgaacaagtaaatttataaataagctaatatagagtaattttaatcaagacttttgagtttgaatatttataaatgcaaggaagagttttgttaatagtgattttattggacttgaatcaaattaaatagatgtgcaatataatgtctacttttttctttttaatcttttaaattgagaaaaaaaaaaacactttctatggaaagttaggagactttttaaggaaataaaacaaaaatgtatacggtgagatacaaagtttcatcatgactttcgtaagagtgtaactaaccaggctcaataaaaaaaaaaagtgtaactaaccaagtatatgccaacaaaaaagacttgaagacatcataattaattttgagtcaagcatgtaacaatatcaattttctcttttagcatcatttttgaaaattaaaactaaataaataattaggaaaaacaggtaactgacccttgaaaagttcgctaattcttaacttatttaatgtctctcttttaatttaattaaagtatttatggtgaagtattttttatgagtagtatttattgtgaagtctttaaatatattaaaattaagtaatgaattaaatgctagagttttaaatgtgaagagacatttaatataagaataaagaatataatataaatttttacagtgtcattcatacataattatacataattatatatatgataaatttgttaacttttataataactaccttgttaggcatattaaaactattttttattaattgatgatataatttttttacacttgacaatacatatttactaagcttttaatataatataatataatataaattgttaaccttcacactttcttttgtaagtttatcaggctttagatttttatttaagaatttaatttcaacaaagaaagaaaataatgatgttttatttcataataaagaaatataactttattattatatttattttattgttgattattgttagacttgtttagaataaaaaaatttagtatgtatacgggcttgggtcaaatgctaggatatgcttaacctagtgttataaggcatttgcttcctacaccagcgctttttctcatacacccagcatacacagtgtaataccgattttatccttctcgtaattcgaaaggcaacataaggttacattacggattcgtaatccgtaagactcttattcttatggattcgtaatccgtacgagttaaaattttttaaaatggtttttgaaataatggtccaggcaagtgtcgaacccgtgacctttggttacaagaatcatgctctaaccaacagagctactagaccatgcatgttaaaaaataattaaaatttctatatataacattacaaattttaatgtatatttaatacacacaaatttacataattaatttttatctaataatattttttttacatatataaatttttaatgtatatgaacctctgattttataaaattaaaatttttaatatatatgaacctaatattttttattcaaatctataatttttaactaagtcatgatttttattttaatttattgttttcaaaattcatatattttataattaaaccatgattttatctaataatatattctttatctaataaaatatacttttttctaaaattaatttctaaaattagataaaaaaatatattatcagataaaatcatggtttaattataaaatatattttttataacaattaatttttaaaaaatattttttattggataaaaaatatattattagataaaatcatggtttaattataaaatatatgaattttaagaacaataaattaaaataagaatcatgacttagttaaaaattatagatttgaataaaaaatattaggttcatatatattaaaaattttaattttataaaatcagaggttcatatacattaaaaatttatatatttaaaaataatattattagataaaaattaattatgtaaatttatgtgtattaaatatacattaaaatttgtaatgttatatataacaattttaattggtttttaacatgaatggtctagtagcttagttggtcagagcacgattctcgtaaccaaaggtcacgggttcgacacctacctggaccattatttcaaaaaccattttaaaagattttaactcgtacggattaccaatccgtaagagctttacggattaccaatccagattacgaatccgtactcttacggattacgaatccatactcttatggattacgaatccgtaagagcctcacagattatgaattcgtaagattactcttacagattatgaattcttaagaataagattcttacggattacgaatccgtaaggtaaccttacggattatgaattatggattcatacacccgttgcctttcggattacgagaagggtaaaatcggcattacactgtgtatgctgggtgtgtgagaaaaagcactggtgtaggaagcaaatgtcgtgttataaatgtgagggtagctacagacccaatatcattttttttggagagggggggagggggagggggagggtttgtgtgcgacctttgacgccagtttttgcagcagatgactcgcatttttgggacaaaatttgaggtgtgagtaaaggtcaggtggtttcctgactgttcatggtgttttgggggtgttttgatgtgttacagtatgaccaggggtattgtttgtgtcaaaaaacatgtctcattgttgtataaggatgtttaacagcgacataggtgccaaggggcctactacgaagattgttaccacttcctccaaactcattggtatcaagcttgatggggatggtgagaattatgcgaaatggaagtatttggttgaagttagtcttggtgggataggttaggaagatcacctaacagaaacatgtccaaatgggtcaaaagcagtgatgtggatacggaggacaaatggatcttaaccctgctcgtcaattttgttgatcgatggacttagtctgttattatccattgtaaatcactaaacaatgaaggaattataggattgtttttgaaattcatctatggaaaatttgataatttgaatcggacttaggctttttagcaagaaatttttttgccccaaacaagataagtggaaatggatggactgcttcctagagttcaagaagtacattgaagaattgacttctctcctcgcttgcaaatctatagaggagtggtgacccaatagaagaagcttatagctctaagttggctttttggtcttgattcaaagtttgaggtggttcacttttagatattatctattcaacatgtggatagtcttactgatgttttctctagtgttgtgcgaccctcttttcaaggctcccgctgaactttggagggtgattcccttgatcgctctactctaacagtttaattagtaggtcgtggtggtactaatggttgaagtcgaggatgtcatggacatggttgaggtggaggttgtggtggacaggtaacatgttatggttgtagggaagtgggtcactagaaattggtgtccttattcctcacagaatcaacagtaatcgcagtcacaaattcatgcagtgtcatagcctgacatttccattgaatcaaaggaaagatgtatgatggttatgaataatgacttttagatttctcaacagtcatcttcatgttacactcttcgatgggtttagtgttcatgtgaaggggagtgagtgtactaccccaattcctaatttaccattgtcttctttttgtgcttgcttgaatgcccatgtaaccttatctccattagtcaaataacacttgttaaattgttttgtaaccttttttttttcttgatttttgtgtatttctagatttgtagacccagaggactattggcagaggaaaaacatctattatattgtacttattggatgaatgagtttcacatgcttttgaggcttctacagtctccacgttttagtttcattgttggctaggtcatccatctttaggaattcttaggaaattatgtctacagttagagtttgtgttgagtatattttgtgagtctttgaaattttctaaacatcaataatgtttttttgcctcgtttaaataaaaaagctcatgctttctttgatattgttcattctaatgtatgtggtccctgcctagttaatttaaagtttgactataaatatttttgttgcttttgttgatgacttttctcgtgccacatggttatatttgatgaaatctagatctgaattattcaccatattgtcatttttgtgctgaaatttgtactcaatttgattgtattgtacatattcttcgtagcaataatgataaaggatacttttctacacatttcacactttcatgaatgaaaatgtcatgttgaatcaatcttctcgtgtacttactccacaccaaaatggggtggcagagcgtaaaaatcattaccatatggagattgcctaagccttattatttgcaataaaggttccaaaattgttttgggtggatgctgttggatataggaggaactggaaagaagatcaaatcaaggatgaagccctttgcttaaaggattttagctttttacatgctattcaattgaagacatttttaatttgttaagttgttcaagaggcttatcttgtgatcctagcatttgcataaacataatcataaacatgcatacatgatttaagaaaagcataaaaggttacatttttccttttagaaagaaattctcatgatttaagttttggaaaatgcatttgtgcactgctttaatcgattaccagcttgtgtaatctattacaaaaccatgaagaacactttaatcgattacaagcaaatcgtaatcgattacacaacacaaaaaacataaaacatgcatgattgccttaatcgattaccactcaatcataatcgattacacaggcttatttcaattctgagactaattgccttaattgattaccactcaatcgtaatcaattacacgagcttatttcaattctgaactgactgccttaatcgattataggtctttttaatcgattactttgttcataaatcttttccagattgtgctaagaacactttagtcgattattttgtgtattaatcgattacattggttaaaataatcgattacatgtagttaaatctgttttctataaaaagctgttgggtctgaacatttgcaacaatctagtgaaattgattttatgaattactcgttactcccaaagctttcaaagtttgagaaaaagattttctaagtcttcatacatcttgtttcaaaacccaagaactcatgcttcattgatgatattgttttgaacaagattcttcaagagtttttcaagagagctgcttttcatcattagcactcattcaatctgaacttgcttggtaaaattcattcattcattcatcctctaaggatcttaaggttgtacctctcttgaactcttaatgtgaattgacttgtttcttttgattcttgtaagtattaagatcaaagagtttctttagagctttttctagagtagtgctttctagaggaaagaacaaggtagtgttctctagttctttgtgattagaagtttaataggattttagatttcagtttctttatctaggtttgataaaggtaatcacttgtaaagcttgtaaagaacaaattttgatttagtggaactctaatcaggtttggttagaagacactggatgtagcttctcttttgaggggtgaactagtataaatttggtgttctcttgattctaattcttgctatcttaaacttgcttatcttgtggttaatctctttcaagatcaactgaaatattttctgcaattgcttgaagtgtagggtggttgattgaaagtatctgttttaacaagggaaaacttgggatacgatctctactccgctactagtttttaaaatccctgttttaaccaattcaccctcctcttggttaattgtgtgtgttcatctttgttttcagatgcaacctttactaccacatatttaattaattgcatgtcatattttgtattgaatgtagtgcctcacttgatgagtcactatttattactatttactcatctttctatactcattttaatccctagttgtgtttaaatatctatattttgcactgtttctcatttgggatttaattagaccgataattcggattttaattaatttggattattttaagtttaattattctaatttttattttcagggcagtttaacaattaattgggcttggaatttaattatggactgaagattagcgccacgtcaacatcagttttaattaatttcgtttttttattattttagtaattttctgggccaaaattgttagggttagcccattcgtctaggttaggtagtttctatatatttagcttatgccgtcagaagtcagaagagaggagacaagagactctacacacactacattctacacagacggcagttttagttttaggttttcttttattttcgttttctatttcttcttgtctttctatttttctttttccgctgtactcggtttttggtttttgttttcgttttctattcagaagctgttttcgttttatgattattgcgttcttttctgggttcattgttcctttaatttcgtatctttcttgttctgttgaatttttattctgttccgtttcgttcttcaattgattttcgtttgctcttctaatttcgtttaaatgtttggttctgtttcaattttcgtttctgcttttattttcgaattaatggaaggctaaatcctagggtttaaccctaggacagattgcaaccctttaatggaggttttctctgcttgaatttcgttttctgctttcttcttcttcgttgggtttctgttctgtctttttcgaatcaggatcatgcttaatgattctgaggttgattaattcagtaatctcagtttgcttaattctgagaaacttgccctaacgaggttcacgtttgcttaattcgtgaaaggacgttttagattaatcttcgcttagtcgattgatctggactattgaggattaagtcagaataatttatcttttgtgaaccgaggatattagaggcgcaatctgttctaaggttgacctgtttttaatcatctgcaattaatttcgtgtttttgtttaatttagttttcgattctgtttttagattttcgcattctgccacaacaaccccccaacacattttcaatccttaaacattgacaattgatccttgagagacgacctaggagtcaacttcctagtactacatttaaaatcaatttaatttggttgcgtacggctgcgatcactcactctattctcttcccctcataatctttttcccccttatgatgtgatccttgctagtagtcatattgtttttatggattgtccttacgttggttatcttggaataagaaataattgatataaaagaagaggaaacaaaaaaagaaggtgagaacagtgcaaagtattaaacaaccatatcaatggcacgaaaacaaagtgaacaagtaatccaaataatgaagaaaaatataaaagatggatagacgaagaaaagaaagaaaggcaccacactctacgagagtgatgagccaagcgaggaatcaccacaaaggtatggaaatctttgataagattcaaaggaggttctaatctaagaaccaaaaaagagtagtcaatgctctactcacactcacaatggagtaaacctcaaatattattcaactctcaatatgataggaattacatccctatttatagaatatgtagacaacacacatctcctaataaggttagttgctagcccaaactttaagaaacatgagcaaaaagctcaaacaagcttaaggccagaattacaacttaagcaaaaacaagcttattctagaattaaaattggtgctcctaattagcatgaaatcaacccatttattacaattaaaattggtacgaaaagttaaataaaataaaataaaaattacgttgcagacccatgctggtacattattaacttgaccttcttccacttgaatcaagtgcaccatcatggactatcttctctcattttaggcttaacccttaaattctgctttggtctctttaatcttgctttcattggtattcctagcccaaccatagggttgtacctttgagctcttcctttctcaagttcttttatcccagttgagagatctttcttctcactgaaatacaacaaagcacactaaaaaggaggttgaatagtatgttagtcaaaatataagaccttttcacaatggaagatgttataataaacaagtttataaaaaccttcatccagtgacaaaaggtggactatcgtctaatgaggtgaaccttgtgtacggagtttggcagtaatggacaataaaatactttaataagctaatgaagaacagtaaaaatacttcattttatactggtttactcagcctaagctatgttcaattttcctttaccaactagtaaggggttccactaatcaaccttgattacaacaagtattctgaaggtcacttttgaaacaatccttagactccccctgaatctaagaacacccaagtattgttttgtgactaagccactcttggctttcacaaacaaaaaattgatataaaatcatagattctttacagcactcatagagtggttttacaataaggttcttatctcttactaatactttgtattctataaaggaaggactctcttaagctcagtgtgtttcataacaagtgcttttcttttgtctcatttcttgtttcacgactctttcctttctttgtatgttcatcaactttcttcaatctttgatatcgtatttataggtaaagagacgcttgtaattttggagagtatcttcagaagtgaatgttgtggtcgttgtgcaaattgatcttgtttcctgaattaagcaaatactgcgtgtttctatctgataagatcagaaccttctatatctatcattcataactcaatatgaccattaaacatataaaaggaaataaaatatagtttagcaaatgtgttccttttaaacataatcatataaattggaataaattgataagtcaaataagttgtgtaaaatataggaacacttcacacttaaccaatagggggggtgaattggttaggcttggtaaatttaaaaatttattgatcaaaaatagagtttttccctttgtggatctttatcatattagaaacaaagaaattttatccaaagatgaacccaaaagatgtaatgcttcaagaaccaagaagtaaatcagaattcacaaagaagataatcaaatatgcagaaaaaaataaagaacacaacaattatactggttcacttcaaacactatgaagctacatccagttttcttctactcaacactatagtagagttccactattgtaaattttagttcttacaagattattacaagtctctctttatcagtcctagataaagttcagagatctaaaaccctattagatccttagagactaaacccagttgagaacactacccaacaacacttagagaaactctatctccaaaattcaagcaaaaaccacttacaatagaaaatcaaatacaagattcaacggagaattacaaacacaaagagtaaggaaagaaagcacatgatgatccaaaagataatatgcataagaatgaatataccaggttgaatgcaagcactaaatccagaacaagcctttccttaaactttgacaagaaaatcttgcttcacttttaatcataaagacccatattggtgttgatggaagcaagaacttaagaacccagaaaaaaacactttgtgaaagcttagaatgcctttagaatgctcagaattcaaaaaactcaagttatgtaaaaagctgagtaaggattcaatttatagaaagatttgtaaccgtccgtaatcgattaaatgtgctcctgtaatctattatttcgcatatgtaatcgattacacacgctcctataatcgattaaaatgttcaaaaacattctgggcagcactaacgagcaatttaatcgtcccgacgtgtaattgattactccagacaatatggcaaaaatgtcgagccgacggggtcaggtaccagtagtgacattggcaaagggggaggggggagctggacactatccttggttaggaaatcaaaagactcgggaaactacttagagtagcgacaaggatttcttcgaacaaccaggtctcacctagtcagaagagaagataggatctttgaacgaaagagcatcgactgccgtctagggaaagccagcccttttccactatacgaaaggaacgaaagcttaaagcaactgtggtaaggaattggattgagaagctaccttttcaatcaatctccggccgctcagtgctgctattggtgtgaggtcacctgcctctgaagctggaatgcctttcttttatagaggaggctacccaaggaatatgcgactttttgttctgccaaggtctaatcgttctgacgtagtctaagtcttctaggggaatgccgaccccgactaggagtggagtagccaggaagaggcaccaaggaggttctgaaagaacaaaagctgagaacggcttatcgagcatttgacaaactcacaccatccatttcaaataggacttgtcccgtggacacacgagcaatccaacccgtaggattagatcttggcttcctcctcctccactggatcgagttcacttacactttaaaatgagttttgtactaagtaatcgattacaataattggtaatcgattataccaggcattctgtaaaacatgtttgtactatgtaatcgattacaatgtatggtaatcgattaagacaatcactatgcaaaacatgtaatggactaagtaatcgattacaataaatagtaatcgattataccagcgtggtgctattttctgcatgagtaatgtaatctattacggcttagtagtaatcgattaggaaggttgtaaaggcaaattatttccattctaagttataataatcgattaatccgatagtgtaatcgattaaactgttcttgataattttccagaaagcttcaagaacaaaatattcgattcttttcttgttttaatcgattaaagcagtgcaatgttatttttccaaaaacacttagcttatttcatgatttaaaacaattacttaatgcctttgttatttaaacctaaatgcttatgaatggtatgaatgcaatgacttggatcatcagaaacttctttccttttacacttaatcacaagcttttctttaaatattcaaaccatgttgaaagccaaaaacatttccaagtcttcaatcctctttatgcttcaagtaactccccctcaaatcaacaagttgtttattccactaattgtatgtatggacttgacgagtacttcatgcttccagtaaattatctagtattggataggcctttcctggtgttgcttccaataatcaatcctgttgacttgcatgcagaaaagtggttaacaaaaatttatatcctttcttttcatcaaaaccttaagagatgtctgggttgtccagtgtctaacaatctccccctttttgatgatgacaaaccatataaattttgagcagtgaatatagaaattatatatcagactaattgtagtatgaatgacaacacatcagaattctatgtttggtaatttcagctccccctaagtctaatatgtatgtgcataagtggatgtagctgtagacacaaatatatttcaaaacaccttattttattgattgacgggtgtttacataaaaaatttctttcataaacttatcccattttttcattagcaaaaaaacaatgggttggaaggttaaagaattaatgaagggcattattgttgatcttgagttgggggtgttggtggatggtttggtggtggtggaatgtcagagtgagtaggtagtggtgaaagtgtttggggaatggctgtttgtgattgagggtcaaggccaagggtttgggtttatgtaggggttggaagagtgggtggaacacttactggtggttgaggttgggtaggtggaagtggtataggggtagtagcagtagcattgaattagcacatgtgggcttattgtagatttagaatgagagattcacaaggactactgaattgagtatgtaacgacccgcctcgtcgctacgatatcactaactctaatcgtgtgaattttcaaatttttaatgaaaactcattaatttgattatgaaaatgataataaattgttcgcgataataccactatcatacacatgatacaattacataattgaatatgtacacacatacatacacacgcacacacacatatagaattagagcatatcattcacatatcagtacttaattcaattttacatgtaattacactcgggatcttacatatctaacaaaataatttaaggaactatcaaagaaagggttgattaacaaaacacaattctttctcaaaaagaactccaacatcatcatgtcggcttggcggcttcaaccaaaaagaatctcctccagagtcacctaatgctgctcatctgctcacacaaacgaaggttcgcgatcatcacaggtaccaaccacacggtacaacaaatgcaagggtgagtttattatataaaaccaacaagcatcagataacaacaattggaaaggaacaacagtaacaaccaaaattattaccagaattccatcagtccaatacacactcgacaaaccaatcattcaattcatatcacaaatcaaacaatcatgatcggaatgatgcatgctcctgatttcactctcaccatgcaatgtggtaccatatctagggaaatagcctttcacaggaaaatgattcatcgcctatcagggtcaccctgtcgtgcgttagccactccccccccacggtgatcaactagtggtgcatgagaattccaaacctaatggcccctttagtacctacgtttttagcccatagaaacccacaggtacgtgcatgccttcattctatttacatcaatgcaatatgaagtatgaaacatgagcatcatcaatgcatgaccatggctaggaacaaatccttccccgcaaggataaccagtcatgcatccctatgtacatacatagcacaccaatatgggctcaccgatgcactaaccatggttaggaacaaatccttccccgcacggataaccaaccggtcactgcatcccacatgtacatacacaacatacaatcatgggctccattaatgcatgaactagctaggaacaaattcttccctgcaaggataaccagtcatgcactcccatgggtatccatgtatatccacatcaacattatctctcatcaatgtcattatcaacatcaacatcattccatctcaacattatcatcatcataaaatatcaacaacatcccatttcaacattatcacccacatcaacattgtttctgaaaacaataggaatatacacaataaccaagagggagcgaattggtttaaactaggcctttttaaaatactttagaaaatcagagttgaagatcttaatcataattaaaataagaatacctcaaatcaatcaaaccactcaatccaagaaaacaattacaaaaacttaacttgttaagtaataaagatttcaccaagaacctcagatcaagataagaataagagattaaagaaaaaagatcaacacaagaatttatactggttcacttctcaagagaagttacatccagttcttctaatcaacactagattagagttccaccattaaaaaatttcagttcttacaagctttacaacaatcactctttatcaaacctagataaagaacagaaatctaaaacactattagaatcctagtgatcaagacatagaaaacccttctctattcttttcctctagagaaactcactctagaaaaagcttcaagaatcatttgtaatagttacaaataatcaaaactatagaaacaaatttacaacaagagttaatggagagaaacaacctgatgatccaatgaatatgaatgaatataatttaccaatgttgaaatgaaaaaacaagtttcagaactttctctccaaaagcttctttgaaaattttgcccaagaaatctttcaatacaccatgaagatttaaaagtgtggaacaagaacattctaactcaaaggaacttttctcactttcagaaggcttatgaaaactttgaaaatttcgaagtcaagggttgtaagtttcagaaaaactcacaaactatttataaccaacttttgtaactgaatgtaatcgattaaatcaccaaagaaatcgattaaattaactcatgtaatcgattaatattccaaataatcgattaaagtgttcttgacacaaattggaaaagatttaagaacaaagtaatcgattaaaacgagttgtaatcgattaaaccaatcagccttggtttcgaaataagtttcagtcatgcattgttttgatttaaggctatgtaatcgattacaattgattgctaatcgattaaagcattcatacatgctttgtgttttatgttgtgtaatcgattaaagtgttcttcatggctttttaataaattacacaagttggtaatcaataaagcaatgacattttgcttttccaaaaacttaaccatgagaaattcgtttcttttgtaaacatgaacaactttatgctttagtaaaatcatgtatgcatgttaatgatcatgttcatgcaatgcaaggatcataagattagcctctcaaacacttaacaaattacaaatgccttggtatgtgaaaagctaaaatctttcttcaaaggcatatgcttcatccttgacttgatcttcttccagctccccctatatccaacaatctccccctttttgtctttgaacatgccaattatcaattgaacatttgttagcctttaagtgctttgaggaatgaataatatgaggcttatacttgataacctgaaatcaaatcagcctttttccaaaagcaagtgttaagtaaagtgtcaagtaaacttgcatagtcttgcataaacataaataatttcttaaattactccccttgaggtccagagtaataaaacaaagcaaaagacaacaagatagatcatagcatatgttcattttatttctccccctacttggcttgtcaaagacaaaaatatcattataaagattataagtaaggagaaaaagaaacataaactgggatttttattcaacggaagggaaaagtgcagtacattaatcataacaaaacataacagaacatctttaacaaaacatttcctttacttcaactttggtaactacttttggaagagaaaagttgattggggtggatccaaagctggtagtgtggatgatgacaatagttgcgtctttagatttggcttcatgtgaggttgattcagttggagccttatctgccttattttgtggtttctcaacaactataactggattggactcaaccatgttggatgcttcagcaattgtagtagttggtttggaaaccaccttgatgggtcttgtcttttcatcttctgtttcagctttcctcttgatagcaactgtgtgtctggcttctgcatcaactttctgtttggcttctttttccagctgaattttccaagtcacctcatatttagctctgttagccttttgcagtcgatgaagatgttggacgcgaggttctaacatttccactattgtcttttggatgtcaaggacatgatgacagaagataatggtagcttcaataggcacactatgaagttgagctctagattcttcatgaagcaagcatttgcatcatcaaagtggcaaactttgtttggatgcaatacttgaatggaatccctttgttgggaagcaagcacatgtgcagagttggaagagctagctcccttggtattataccacatcgtctaattcgacgaggtcttaacatcatcaacatcaagcttcctgatgagcctttgaccttggaatagagtcttctagtcgcaggagtagttgaccaaccgtgtcttctattttttgttgggcatgtcttcattgaagtagagcttgaagcccttccttttcccttcttcacagatggacagtctttgatgtatggctggatgtagctatgatgtatagctgaacccatagccaatagttttcccaaatctaccttgcaatgaaactcaatcttcaagcaaacttcaagaactctgaattctgcactttcacaagaatttggggctgtttttaagctttttaattcagcaatggaagatggaagaaaggttatggatgaagatggatggcaccacggaaaagctttccaataagcctaggaagaatcaccatgatagcattgagaagccattgataagactcaagaagttcttacataagaacaaaagagaaactctcacaacaattttcagaattgtattaataaaccaaaagttagttacaatcaattttggcaccttataaaagccatgaatttacaagctaaatgtcactaaatgtaaggaaaatgaaaattgaaatgaagaccaaatgaagcttgaagtgcaagcttccctaaagttactcttggctactcagcatgcgcagtgcagtttcaacgttgaagtaatcgattaatttgcacttgtaatcgattaattcacacttgtaatcgattaattcgcatttgtaattgattaaaacagagttatttacaattttcaggctcatgtaatctattacagatgtctcgtagtcgattaaaacagacaagtcttgtttctatgtgaaactgaattgctggtaatcgattacaggaatctggtaatcgattacaggtatcagaaactatttacaaaatgcctatgtaatctattacaggaatctggtaatctattaaaatagacaacactttttttgtgtttgcactaaattggtgtgcttcttcatgcttttccaagagatacaagttagcttggatgtggtcttgaagtgcttgagtcttagctcttgtcattggtcttttaaagctcaccaaaggaagtgcttcaagctttccttctagaccattagcttgccttggacctccatcacccccttcttcttgagagaaacttgccctcaagttttcttcctcacttgtacctacatcatacaatgaaagatcacaaacattgaaagtattactcacaccatactcactaggcaactcaagtttgtaagcattgttgttgatcccctctaaaatcttgaaaggtccatctcctctaggttggagtttggatttcctttcatgaggaaatctatcattccttaaaatcttaataagactcaagaagttcttacacaagtacaagagagaaactctcaaaacaatttttagaattgtattaatgaaccaaaagttagttacaatcagttttggaaccttataaaagccacgaaattacaagctaaatgtcactaaatgtaaagaaaatgcaaattgaaatgaagcccaaatgaagcttgaagtgcaagcttccctaaagtgacccttggctgctcaacatgcgcaatgcagtttcaacgttgaagtaatcgattaatttgcacttgtaattgattaattcacacttttaatcaattaaaacagagttatttataattttcaggctcatgtaatcgattacagatgtctcgtaatcgattaaaacagacaagtcttgtttctgtgtgaaattgaaatgctggtgatcgattacaggaatctagtaatcaattacaggtatcagaaactatttacaaaatgcccatgtaatctattacaggaatctggtaatctactaaaacagacaacagttcttttgtgtttgcactgagttggtgtgtttcttcatgcttttgcaagagatacaagttagcttggatgtggtcttgaagtgcttgagtcctagctcttgtcattggttctttaaagctcaccaaaggaagtgcttcaagctctccttctagatctttagcttgccttagacctccgtcagtcttcgacaaactctatcagacaccatcatgatgttagtgcatctgctgatgtggagttcaagggaataaacagttgcctggtttggtacatacatcttctttaagatgcctattatcatatcaagatcttgtttggagggtcttaggctggaagaatgggaaggaatgaatttggtgcgacgagtccatatttgcacctccttagaccataatgtttagggagtgggttctccttcgaggggtccatgctgatgactactgcaggaagagtgagctttagtgatttgtcaaatatatcattgaaagtgattgattgtttctgcttctgctcagctggcacaagagatggacgagtggttctagtggtaccatttggcatccactgaggaatcatccttaccagattgggaatacatgttgatttgagggggagttgcttgaagcacaaagacaattgattcaagaaaggattgttttgaactttcaacatgcccttgaagcattgaagaaaagcttgtgatcaaatgtaaaaggaaggaagttttctgatgatccaaccattgcattcatatcattcataagtttgaaaaatataaatcacaaggcattgataaattgctttaagtttttgaaataaactaagtgtttttagaaaaatagcatatcattggtttaatcgattatgacaggcaaataatcgattattttgttcttggtattttctggaaatttttcaaaaacagtttaatcgattacgttatcagaataatcaattatttgatcttagatcacatataatctgccttagtgacagttttaatcgattaccaccaagccgtaatcgattacataagtcaaatagaaagtaccatatctctggtttaatcgattaccaattattgtaatcgattatgtagttcaaaacatattttgcatacttcgggtttaatcgattacgcgtcggaataatcgattaatttgttctttatagttacccagaatcattatgaacggtttaatcgattacatgagcgtatgtaatcgattacaaatgcaaaataatcgattactggagcgtttttaatcgattactgacggttagaaatatcactataaatagaacccatgctcagctgttttcctaacttgagtaatttgtattctgagcattctaaggctttctaaacattctctaagtgatatttctgggttcattgagttcttgcttccataaaactcttatgggtctttaagggatgagtgaagcaagattttctcttttaaaagtttaaggaaagttatgttctgagtttgtattctgcattcaacctggtgaaatcattcttatgcatatcattctttggatcatcaggtgacttctttacttatcctttgaagttgtaattctcttttgaattttgtgttggtttgtctattgtaaatgagtttcttgcttgtaatctagagatagtgtttctctaggggatttgctgagtagtgttctcagtagggttgtctctaagaatctaatagtgttttagatttttgaactttatcttgggttgataaagagaggcttgtaataacttgtaaggactgaaatttacaatagtggaactctactctagtgttgagtagaagaaaactggatgtagcttcatagtgtttgaagtgaaccagtataaatctctatgtgttgttttaattctgcttgtttagttaactttatctttcttgtttgtgaattcttgttatctacaaatttttgaagcattacatctcttgggtttaactttggactgaataagggttcttggttacaaaagtgataaagatccaaaagggaaaaactatgattttgatcaataaatttttaaattaccaagagtaaccaattcaccccccctcttggttaagtgtgaagtgttcccatattttacaatacactggtctcatccaagattgggtatctagagccactatggcatctgggggcaaagtcgcatattcagcaaatgaagtatagacatacttataccacgtccattgaggtggagttgctacctcatgttgtctgtggatgggttccatatgtggtctttggatgatctcactctaagagaagtgattctattaattccttgtgaggaaggtaactagaaacttcatgtgagtaatcttttttttggtttgttggacccaaggtctccagcttcttctctgtgtggatccaagcaatggaaacttggatgtgttgattggagagatagccttcttggtttgtactggtggtggactagattgttatggagtgggagtttgagttgcctcactattaaatgagctagagctattggaggatggaatcttgatgggttcttttgggattaagtactattgtctccctcttctttggaaatgaggaagggatgattggatgattagatgagtaggcctctacctcttttggacaacaggttcttcttgttctgcttttgcttccttgggattatcagagggcccttatcttttgtttcacttaaatccctcaacttttgagctttatagtctgctcagttatttgtctctgacttattctttttgaagtggtctgtagatgagtcctttgatattggattggacgagaaggtctagactcctcatgctttttcttagttcgtttctccttggagacgatttcttcttcttcttcctcttcctcctcttcctcttcttcttcttcttcttcttcctcttcttcctcttcttcttcttcttcttcctcttcttcttcctcttcccttcttcttcctcttcttcttcttcttcttcttcttcttcctcttcttcttcttcttcttcttcttcttcttcttcttcttcttcttcttcttcttcttcttcttcttcttcttgagaaggtctagactcctcatgctttttcttagttcgtttctcattagagacgatctcttctttttcttcttcttcttcttgttcttcttctcttcttgttcttgttgttcttcttcttcttgagaaggtctagactcctcatgctttttcttagttcgtttctccttggagacgatctcttcttcttcttcttcctcttcctcctcttcctcttcttcttcttcttcctcttcctcttcttcttcttcctcctcttcttcttcttccttcttcttcttcttcttcttcttcttcttcttcttcttcttcttcttcttcttcttcttcttcttcttcttcttcttcttcttcttcttcttcttcttcttcttcttcttcttcttcttcttcttcttcttcttcttcttcttcttcttcttcttcttcttcttcttcttcttcttcttcttcttcttcttcttcttcttcttcttcttcttcttcttcttcttcttcttcttcttcttcttcttcttcttcttcttcttcttcttcttcttcttcttcttcttcttcttcttcttcttcttcttcttcttcttcttcttcttcttcttcttcttttggatcgtcttaatattcgaggaatgagcctgtttctttttatgtcaaccttcattggcttcaggttgacaacactgaagtgttgctgtttggaaatgatagttcccatgttgatgaggtgtgcttggagtcctcatccacactttcgaaggcatggaatacctggtgtttgattagcaatgtcgtatcacatcaaaacaattaaactacgctaattctgtagcacgggactaacctaggtagactcagagacactatcaatatgtttccaacttcaatccattaataaacaataggggatttttgtcaaacagtttgcatgcgataagtaaaaattgcagaaaacgtataaactaatgcgaattgataagaggtaatgtaaaacagattaaagagaatcaattcaattcaccaaaacaggcaatggtaattattatagttctcagataatgattctgttatgaaagttcattcaatttcataagaagtagttcaatcgaattaactcctaaataattgaaatcacaaacctaattgaaatatcattcaactaatctatgattaaaattcgaaattaggaaatgaagtcataacctaatctactttcaatcctaaacacattcataatcatgaaaattgaatagaggatattgaagaagaaagtgaacattcacacagaatttgaaataccaaactagaactcaaattcccctttacttggattggatccttggattgattgattgtttagcctcccatgatcatcatcaatgaaagccccacaaaattggtgcacaaaaatggaagaacagaaaatgaaaatgaagaacagttgagagaaaataagagaaaaagttttgattttgaaaacttaaaaagtaaaatgtaaattctacttttgctaaaaaatgtagtgtaatattcactccctaacttcactagcatatagtgactaagtcagaaggaaagaatggaccatgaatagacccatctattctaattgattgtgctatttacaccaataaaaatccaactcgcagcccaaaattcaagtgcagtgattctaacttcaaagcctaaaatgaccctccaaatgacagaattagtcgcagcttatctctgacaaacttgtagatatttttcatatctttccaaggactactcatatgctccatttggagttctgtagagctctataggtcctatacaaggaagataggtcaagtgagcaaaaaatccgaaaataagcaacaattagcaattaagcccacttgcctaaaataaaaactgaattagaatgagaaaataaaagtccaagagaagtcaaataagctaagaagaatataaatgtcgcccactgatgtgttgcaaacacatcttatttttagaatagttttagcttatgttttgagtaaataattaggatttagtttagttttggttagtttattaatattattttattttatcttatttcaatatcaattatgcaatttcaggacaaaagaggagaataaagaccaaagaaagaagaaaacaagatctggagactcacgcgggtcgcgccactatccacgcgggccacttggaagaccagagaagatcacgcgagtagcgccgttactcaagtgggtcgcgtggaaacctccaggtttaagccatttcagctctgccaatccacgcgaagcacttcacagtccacgcgactcgcgtcattcatttctgccgagccgcgcgactcgcgtggtatcgcgcgcgggtcgcgtgaggttgaggctgtttccttatttaaattatatattttcagatttgatattatattaggattagttgccttaattaagtgattctataaatatatttagattccttaattaagaagatttgatttagatttggaacagaaaataggccttgttaccttaattagatctatctataaataaaggcctctgggggagttctagatatctcagacatccattatctcacatctctaaccatccaccatcaccttctatcatccattctactctctccttctcctattttcaccattggaagtcaagaatcaaggcaaggtcactcaagaatgttctatttgatagcttttggtttcttgaagcctatggcaggctgaacttgtattgtgggaaggccatgaactgatgtaactcctctgtaacttgaattggtattgattttaatgctgttttgattattttattctactctgtgctattcaatgttttactcttaattggaattggccattctatttaagtattgagggttagaattcgcaatggacacgttggggttctaatttctgacctgtttagaataatagttgttcttcgcctagacatagggatgcgtggctacggattttataatatgttctttttcatgcttaacttaatagaattcaccaagaaattgggtttttgaattgggttaaagggttgattcactaagacattagggattaactaacttaggaaaggcttatcctccgaataatcttaacaagatcacatgagatatattctttgaatacttagtttgacagattcactaagggtttaggtttctcgatcgaactaaagggtgaaatcgctggttaatgctcttaagagtctaggatttacgaatttaggaaagatttatcatgtgtgtgacttaagataataaaccaatcaagtgaaggaggtaggaacaaaagggattgtgcctgaccacaattgtttcttccattggtaaattttcttactattttattacattttaatttctgtttttattcaaccaatcatccaacatcaacaattatctctttatttgctgttttattttccaatcatttagaattaatattattgtaaaaattaccccaatccctgtggagacgataactcacttacctactttattacttgttaacgatcggtgcacttgccgtatcaatcgcgtaatcgcgcaacacccactcctcccagggtctacatgtttcttagtatgttgatgtagacggtgtatgaaaggtcgaatggaagcttgcctatcaggtggaagagcacaaatttgtgtagattagacacaaattctttggaacctactttgtgcatgaagctcttttgagtgatattggaccagattttggccatatcacactgaaggttgtattgaacctttttcttcccatctgcctccttgacattcttcccacagagagctttgggaatgtggctctcataggtcttctcacagtcttcttggtacatgcttctttccctgatgccctcagtgacttgtgcaatggtctccatggtcagcatgacttctttttgatgaatcttggacataatggtcttccagtcattaatttgaacattcctctagaacatcttgatgagttctgggtacatcagttgtggatctttgaagtagccatggattctgtagagtacgctgtatgttgaggccaagaccttggaacatactaatgtcgaagacgtgttcaatgtgagttgtaggttctccatcactgtggatggttgtggtgatcatggtgctggtaggggcagtgtttttcctggagttcgacatggtgagcagagaaaaggattagggtttctatgagtttttcttgagagaatcttaagagttcttgtagagatagtgaagataaaccatttccctaatttcttagagtttataaaggaatgtgagtggtttctctgggcttttaaaaggtaattaagagtcatgttacttaagaaaagctcaacaatcaaaatgttaggttttaataagatagagttttcaaaatatcccgtgtccactcttagtcattcaattatgtatgtttgtgtggccattagacgacatgtcctctagatgcaaagtataatttgtcaggcatttagatgttaatcattcctttactaaggccatttcgagttgatctcttaatagaatcagcctcccttcagtgaagggttttgtaaaaatgtcagcaagctgactaaaagtaggtacaaactatagttccatcattcccttctaaacatggtctcttagaaagtgatgtttaatttctatatgcttggatcatgaatgcagagcagggtttttagagatacttattgtagctttattatcacaatagatagtgatgttttcttcatatatactatagtttccagtggattctttatctatatcagttgagtgtagcaacttgctgctgatatgtattttgcttttgcagtggatagcgctattgatccttgcttttttgcttaaccaagtgactaggtttccaccaatgatatgacagcttccactagtgcttcttctttcaatcttatcaccaggatagtcagcatctcaataactaatcaacctaaatttcttgctaaaacttaaattaaaaaccaatgttagaagttccaattaaatatctaaatattcttttgacaatagttaagtgaacttcccttgggtcttgttggaatttggcacatagtccaacattgaatagtatgttaggtctggacacagttagatatagtaaggatctagtcattgctttgtattgagagttgttcactttattggattcctcattcagttcaagacatgttgttagatgcataagggtcttcatttttttgcattttccaacttgaacttcttgataagttccttgacattcttggtttgatggatatagattccattgttggtctgttttatttgtagtcctaaaaagaacattagttcacccatcatactcatttcaaattcagcatgcattaacttagagaaattatcacagagagcttcattagtagcaccagatataatgtcatccacatatatttgaactaatataaattgagagtcatagttcttgcggaacagagttgtatccatttttcctctttcaaagtcattgtttacaagaaatgaactaagacattcataccaagctctaggagcttgcttaagtccatacaatgctttgtagagtttgaataccatgtgtggaaaaatgttactctcaaacccagggggttgttctacatagacttcttcttgtattactccattgagggatgtgccttttacgtccatttgatatatcctcatttttgtataagttgcaaatgaaaataaaatacacattgcctcaacacaagcaacatgagaaaagttttttgtatagtctatacctttatgttgtgagtaacctttggcaaccaatatttccttgtttctcacacccttacatgccttgtccaacctatttctgaacacccactgctttctttccttgtggaagttctacaagcttctatacgtcattcttttggaattgttcaagttcctcttgcatggattttacccaattttcatcttccatagcattatcaatacgcttctgttccacttctgaaatgagagctgtgtaaccttgttttctaagtgatcctcttatttggactttggctgagggatctccaatgatttgactttctggatggtttttccttagaattcgtccagttgtttctctttcttcttgaggttattctatttcttgattagacacgtttgtttctaaaggttgtttggtcagtgttccgatgcttttgtctagtctgtatctacaaaagattcatcaagctctgacatttctgtatcaggctttgtgtcactaaatcttacatgaataacttcttccataaccgaggttctagagttgtaaactctgtatcccttggatgttttagagtaccaagaataaaacactggcatccaaaaggatggaaatatgaaatgttgggtttttctcctttccacaattcataaggagtcctttttagaatgtgtcttatatagattatgttttgtaaataacaagtagtgttcactggttcgacccaaaaatgtttaggtgtagagttgtcattgagcatggtcctagccatttcctgcaatgatctattctttctcttaataacaccattttttaagtttttctagtagtggagaagttatgaagaattctattttcttcaaagaataaatgaaagctctcattttcatactcttcaccaagatcgcttctaattaaagtaatgcatactttcttttcaatttgaacttttttacataatttaaagaagacctcaaaggactaattcttgtgagcaaggaacgtaacccatgtccatcttgagtagttgtccactactaacagaccatatctcttcccacggcaaaggccattctagttggaccaaacaaatcagtatataatactttaacctcaaggttgcatgtctaagtttcttgtgccatacctagtgattttctttgatggatagtagacatgttacattttgatttgatagttcactaagattaatattgtaaagattacctttcctcgtagcagtgaaaagttgggtcccatttttgtgttagatgacacaccctctttttgggtcccatcttgagtagttgtccactactaacagaccatatctctttccacagcaaaggccattctagttggaccaaacaaatcagtatataatactttaaccttaagcttgcatgtctaagtttcttgtgccatacctagtgattttctttgatggatagtagacatgttacattttgatttgatagttcactaagattaatattgtaaagattacctttcctcttagcagtgaaaagttgggtcccatttttgtgttagatgacacaccctctttgctaaaggaaacgtcaagtccactatcatataattgacttatgctaagtagatcgtgtttaagcgctttaacaaatagtacataatcaatgagaggagaaggattgacacttatctttcccaccccttgataaagtgcttttagttgaatattaagtaagtggacttaattgctaattgttacgtatttttggatttttgctcacttgacgtatctgacttgtgcatgacctttagagtgctactaatctccgaatgcagcgttctaggagtccctggaaagataacgaaaagatatacaagtttactagaaatagcttgaggccaattctgtcatttggagggtcattttaagcttcgaagttagcacctttgcacttgtaattttgggctgcgaatttgattttcatggttgtaaatagtaaataattagattgttgggtttgtttatggcccattccatattcagaacttagtcactatatgtattagtgacttagtgaaacttggatagcacactttacaattcaataaacaagttttacatttcttttctttagtttttagaatcaaaagcttgttcttcattttctctcaagtgttcttcattattcttcatcttcttcatttccattttgctattcttccatttttctgctctcaattcatggggctttccttggtgatcatcatggaaggctaaatcattaatcaatccaaggatctaactcaagcaagagaagaattggagttccggtttggtatttcgaattctacttgaatattcaccttcttcttcaatttctattatgttttcatgattatgaatgcatttaggattgaaagtgaattaggattatggattcatgtcttaatttcaaatgataatcacaagattaattgaatgatatttcagttagggttgtggtttcaatcaatttaggagtagaatcgattgaactacttctattgagattgaatgaatgttcataatagaatcaatttataggaatgatgatgattcaaatagcttgggttagtgaattggattgatgctttctaatctgttttactttactccttgataatcttgttaatttttgcattgttctttaattttagtttgtgttcttgcatgttttactttacgcataccaactatttgacaaaatccccccttattattaccaatgatttgaagctagaaccatattgatcgtgtctctgagtcaacctaggttagctctgtgctacagaattagcttagtaaaattgtttttgatgcttctcgacaaagtaatatcaaaactggcgccgttgccggggatacgattcattgtgtgctagctttaattcattgtaattagttcatagaagtagttttaattcttgcatttttgttttggttgcacaactatgcttgtaacatgactatgtgcttgtagttgatgcattagctttgtatttgtccataaaaatagagaaaaacccataaaaacagaggaaaacccataaaaacagagaaaaagccagaaaaatagagcagaacgcccagctggcgggaccagtgtgaccatccatgctgatcgcacctagaattcgaaaccagggacctctgttgaagtcctggtgctgattgcgcggcttccaagctagtcgcgccacaggttcggcaatttgacgctgatcgtgccaaactggcgctagtcccgccgtaggttctgccaacccacgctgatcgcgtggatcccacgctgatcgcacgaacttctcgaacatcccacgctgatagcaccagtcccacgctaatagtgccagcgtaaaaaaaaatttaaaattttgattttgtataaactttttagggttgttttagtgctttttattatcctttatgagttgcattgtgtatgactaggtccacatcaagtgaattccattcatttgatcctgagatagataggacatttcatagattaaatagacaaaaccttaggttagatgactttgatagtatagttttagacagtaacatagcgtcttctgactttgattctaattctaattctactgcttctacttttacacatcttgattgtaaaatataggaacacttcacagttaaccaagagggggagtgaattggttaggcttggtaatttaaaaatttattaaacaaaattagagtttttgcccttttggatctttatcacaaacacaaccaagaacctttatccaagaatcaacccaagagatgtaatgcttcaagaattaagtagttcataagaatttacataaaccaatcaaatatgcagaattaaacaaacacacaaggaattatactggttcacttcaaacactatgaaactacatccagttttcttctactcaacactagagtagagttccactattgcaaattttagttcccaaacttcatttcttttaaattgatttaactcttcatgcatggcatgcatccaatgttcatcatttaaggcatgattgatatcttttggttcaatttgagaaacaaaagccatgtcacaacataaatttctacgagaagatctagtagagactccctttgatacttcaccaatgatgttatctagtgaaagatctcttgtggttctccattctttaggcatttgacttggagttgatggaccttctttagcactaggttcattcttttcattgattgacatcttctcaagttgaacattctgttctatttgacttgcatcttcatcacaagctttttcgtcttttgaggggttagactcatcacaaattacatggacagattcttctatgcacatggttcttttattgaagactctatatgccttgctttgtaatgaatatccaagaaaaatggcttcatcagcctttacatcaaattttcctagtgattcctttccattatttaagacaaagcatttacagccaaaggttcttaagtgagaaacattgggcttttttcctttatacaactcagaaggggttttcttcaatataggttttatgagtaatctatttaaggtataacacacagtgtttacaacatcagcccaaaaatattttggtaaatttgtctcatttagaagtgttcttgcaccttcttcaagtgatctgtttttcctttccacaacaccattttgttggggtgttcttggagctgaaaaattgtggttgattccattttcctcagaaattttcaaaatgatcatttggaattctccaccatgatcacttctaattgagacaattctacatcctttttcattttgaacaagtttggctagttttctaaaagaatggaaagcatcactgttgttcgatttatgcgaatgtgtacggcaagtgcaccgatcgttaacaagtaataaagtaggtaagtgagttatcgtctccacagggattggggtaatttttacaataatattaattctaaatgactggaattaaaacagaaaataagagataattgttgaattgatttgttgtttgaatagaaatagaaaataaatgcagtaaaaatataaaagaagttaccaatggaagaaacaattgtggtcaggcacaatcccctttgttcctacctccttcacttgattggtttattatcgtaagtcacacacatgataaatctttcctaaattcgtaaatcctagaactactagagtcataaccagcaatttaaccctttaattcgatcgagaaacctaaacccttagtgaatctgtcaaactaagtattcaaagaatatatctcatgtgatcttgttaagattattcggaaaataagtcttttctaagttagttaatccctaatgtcttagtgaatcaaccctttaacccaattcaaaaatccaatttcttggtgaattctatcaagttaagcatgcaaaagatcatattataaaatccgtagccacgcatccctatgtctaggcgaagaacaactattattctaaacatgtcagaaattagaaccccaacgtgtccattgcgaatcctaaccctcaatacttaaatagaatggccaattccaaataagaataaaacattgaatagcacagagtagaataaaataatcaaaacagcattaaaaccaataccaattcaagttacagaggagttacatcagttcatggccttcccacaatacaagttcagcttgccataaagaaaccaaaggctgtcaaataatacattcttggtgaccttgccttgattcttgacctccaaaggtctagagaaaagaaaggaagagtagagaggtgtcagtatgtgtgtaagtgtgtgtaagtgtgtgttgaacccccccagaggcctttatttatagatagatttaattaaggtaacaaggcctattttctgttccaaatctaaatcaaatcttcttaattaaggaaactaaatatatttatagaatcacttaattaaggcaactaatcctaatataataccaaatcttgaaatatatgatttaaataaggaaactgtttcaacctcacgcgacccacgcgcgattccacgcgagtcgcgtggactgaccgaaaagatggcgcttgtcgcgtgaaatgtgaagtgcctcgcgtggagtaacagaagagaattccttatttctttgagtcttcacacgacccgcgtgacactccaagtatgtcgcgtggaatagcagcgttgaaatgcttaaatcttgaagttcccatgcgacccacttgagtaacggcgctacccgcgtgatcttctctggtcttccaagtggctcgcgtggatagtggcgcgacttgcgtgatactccagaatttgttttcttctttctttggcctttattctcctcttttgtcctgaaattgcataattgatattgaaataagataaaataaaataatattaataaactaaccaaaactaaactaaatcctaattatttaatcaaaacataagctaaaactattctaaaaataagatgtgtttgcaacacatcaaacaattcccagatttattagttgctgtcctcagcaacagacagaactctaagataaaaacaaggatcaacaatcaaacctgaaccacaatttacaatcctagacttatcatgctgagtataatcaagttatattaaagcttctatggtactttcaaattcatcaatgaatgagatgacttgagtattcctcacagaaatgtgtgtatgcactcatgcactcaagtgtattaagttaatcaatctctcactcaaacacaatcaaagcactaccataggcttgaaaatattctcaacagatgcaagcacaattagatcaaaaggtcttttaggcttgtaacttggctgggctaagggtaggaaaaatctttggataagtagctagtatgaggctagatccagtcccttaagtctaatcctgtggtcttccatttttcttgttcatcttcttcacaatcaggtactttattcaacatttattccttataataataataaataaaacaaaacaaacaataactttctttttgatttttcttttcactatacagcaactttcaaacttttcattgatactttcaggcttattatttttcaactggcctgttacttatttcttctttttccttcataccaattgaattcactttgttttccttgatgtcttgatgaacacttccctgttttctgttgtcatgaacttaaattaccttctctagcctcagggggtttggtcaatggatattgctctgatttgggtaatttgaaacaaaagtttaagctcaaaaataggtgcaaatggaataataattgaaggtaagtcaatttggccctagttttaagaagaagaaattgccttaatcatgtcaatttatacctgcatccagagaaacaattcaagttctagagtactaagaaaatggagtctctcaagaagaaaaataattactgtttggctcaaaagtctcacaggtatttcactcaagtcaatcactattgacttcatttcaagcaacatttcaacttcaacatgcatgtcatataccaacaatcaaaatccaatcatgtatcatgcaattcatgctatatttcatctcacacaagcttttatcagagaattcctatccattactgtgttcattcacttttaagtctgaaaaatttgatgtgctgccaactttattgtaataaaaatttaaaactattgactaaaacaaaaaattttctattagacatccttgaatgtaattcagcaaatactgcatgtgtaccattcccagatttaggaaattgctgtcctcagcaataattgaaaaatatcatatgttgtcttaatcaaacatgcagtatttgggactcacacctagaatgaagcagaatttatttaaaacagataaatactaaaacataccaaaattaaaaacagaaataagaacaataaacaaattaaatagtcctgatgttggcatttttctgcagtatgtagcaaccctttgctagcttgtttttcttacttacttcatcctatagtgcagaaaaatccaattatacctgatgcagtagggaattccctgatttattcctttcattatagctcaaaacaacaatcaggccaggagaactgtgcattaataaataacacgcacacgaataaaagcacagttgttaaaaacaacaattatgtgtgtaagtggttgggaatttaaagtgctcataattttgcagtgctcatgattcccagatttatttcattccatagtttcacatagtcaactgtttgttattcacttggggttaaaaatttcagtactaacgatcagttctaaacaaccccaaacagatctcagacacctgtaatttagaatttaaaacatgcaagccaagctataattatttagaaaacaatttagtacttaacaaggcttaccaatgtggattcccagatttacactcaaacatattacaaataaaatcattacttagaaccacacaagaatcacatcgctttggatgtgcttaacaacaattcccagatttaagtccttgcatgtatcaaaattttcagaattcaattatttcatgcaagcctacccccatttgattcaacacttaagcacatataaaagatgaatctccccattcccagatttaggcttttagcatgtttaaggcatttgattcaaaatattagcaattcatgccttaagagtatttcattattactcaattcctgcttaccatagtcattctcatcatgtcatcctaattcattaaagccttatgcatattgaaccaactttggcatcatttcaagctaaatttttcatctaggcatttcatcaaacaggtaatgtgcatgaaaacaaatcaacacaatgtgtgtatttggagtatgttaaaaccgaaaatttttgcaatccgttcagaccacagacaagaagatagatgtgaacaattatttatatgcaattttgaaaatgtggttaaccctaaggtgatccagagtttaggcttaccttgtccttggccattgtctaatgcgaatgtagtgaatgcagtgaattgcagagaatatgtgatttgggtatgaacaatgtgaatcctgaagttatggataggttttaaaggtgtgggaaagggagaggaagttgcggaagtttgagggagttaagggaagtttgagggcaatgatttggaagagtggaagtgaatggcgcgatttgggagttttaatttaaaaacgattcccgcgcagtcacgcgagtcgcgccattaatgaagtgggtcgcgtcatgttccagtgtaaaaactagttatttcaaatgggtcgcgcagatttcacgcgactcgcgtgagatcgggctttttaattctggacgttcacgcggttcgcgtcatattccacgcaggtcgcgtgcattagtgcttttaggcactgccccatggcgcgagatacgtggtttccacgctgggtgcttggatttgtgcagacaataaatgcttttaatagcagatgacgcgactcacgtggattccacgcgactcgcgtggatggacagtatgtatggcgcgagtggcgcggtttatggcgcgagtcgcgtgacttcccttgtctggatttctttagttttcttcctgctcttcaatcttcttatcctaataactaaagttacttaactactcctaaatgacatactagaactaatactactacttatttaaacaaaatttgaatgatcataatgcatgaacttaaaattacatgaataaattgtagaaatttaaatctactgctatcaactgaatttaaaatacttaagaaagtataatgattatatggatacatgcatatgtaaaataaaacaaagactaggctaataacttcaaaacttaagcaacagttatgtacatgaccagagcttgtttaacgtcttagctagacgcatcatgctttttaattattagtggaattaagtgaattaggagttttagcactatccacttggttttcaatgtaaggtttcagccggcatttaacaactttaaaaggtttacctctgtctacaggcatgatttctatgaatccaaatgagcaattcttttgaatgatgaatggaccagaccaacaaaaggctttcttacctggaaataacatgcgatatgttgctagcattaccttttgtcctggctcaaatttcttctttttattatgcttcttcttagtcttctttttcttggttttatccttatccattgcaatcacatgtatgttacctttttgtgctccaattgtatcattatcttgctttttcttcagcacatgttctgctggtttttccttataagccttgttgcatttttcagcaatttctaaagctgccattgctgtccttgctgcatttactgcattattgttttctgcacaatttgaagttgctggtatagctaccgctgtcaaattttttgcagcaatttttgtgtgttctaaactctcttttgcagtattttctactgcggttgctgcatctaatactgtcatacctgcacaatgcatgttatccagcacatctaacatagaacaattataactattagatggattagtcacagtattaaaaacattaaaaacaacagattcatcatccatccttaattccaactttccttgttccacatcaatcaaggctctagcagttgctaaaaatgatcttcctaaaattagagggatttcactttcaccctccatatccaaaaccacaaaatctgcagggaagatgaatttgtctacttttactaatacatcctcaattattcctgatggtttccttaatgatctatccgctaattgcaaggaaactccagtggattttaatttagttatacctagggacttacacatggataatggcattaaatttatactagcccctaagtcacaaagtgcctttcctatatttatatttcttattgataccgggatattaaaacttccagggtctttcaatttctttggaagttttcttaaaatgatggcactacactcctcggtgagttttatggttccaccttttattagcttttgtttcttagacaagatttttttcatgaattttgaatattgaggcatattggctaatgcctcagcaaatggaatatttacctgtaactttttaaacatgtctaagaacctggcaaactgctgttgttgaatttgctgtttggttagcaccggatatgggggtttctcaaagcgagagaaatcccattgcttttgttgaggtgcagaatttggctcctcagaattttctgcagctttttcttcatttgtatcaactgcagcagatttttcagcttccttgttgcttgcctcatgctttatgggttcagttagcacttttccacttctagttgtgacagcattgacatgttcccttggatttgtctctgtggcacttgggaattgtccttgtggcctttctgaaatttgctttgccaattgaccaatttgaatttcaagattcctgatggaggcatcttgatttctgtggtgggctctagtctcttggatgaagtcagatgttgtttgtgccagctgcattactactttctcaagttcagaaatgctggtggtgggaataggagggggctgtagataattattagacttgtagtctaatcctcctccttgcagattcctttgataattgtttccagcagtataattgtagtttttctgctgtggctgctgctgtctttgatcattccaaatgccattaacctgcacaaggtcagctccaacatgaataggacaaacattagaataatgctcaccttggcagtattcacaactgacttgtggtttattggctgaaacttgggctgcagagacttgcattctatctatcttttcatttaatttagccaattgttgggctaaaattttctgttctgcaagcatggcatcactgctgtccaattgtattggttctctctttggctgaatggtgctgcttacgttttcagtgcaagccaacgatttaattagctcataagtttgagctgctgtctttgatctaattgtgcctcccgttgcaacattaacaatcattcgagtttcaggagttataccattaaagaatatccttacctgcttacctacaggcatatcatactgtggacatctccttatcaactcttgaaatctattccatgcagcgcataaggactctcttccgttttgtgtgaagttggtgatttcattcaccaagcggttgtatttttccatggaaaaatattcagcgaagaaccttgtaaccagatcttcccatgttgagatgctatttggtgtttgacagtttaaccatctcaatgcatttcccttgacagcaaagggaaataaactcaatcttaccgcatcgtcggagactccttgatgtctaatggtattacagattctaagaaatctgtcaataaagtcatgtgggtcttccgaatcttctcctccaaattgactacgttccaccaatactatcaaagaaggattaatgtcaaaatgattagcttgaattggtggcctcacaatactggagttaggccttgtgaacataggagccagaatatcctccataagttcatcctcaggtcttggccttggtgggggccgatgatttctttcttcttcagccatctccatttctgattccaactctaattcgggaatcgaatcaaagtcaaaattctcagcttctcttcttcttctttgtatggctagtcttcttcggatggttctttctatttcgggatcgaactgcaagtccttagaattgactaaacctcgcataaaacttggagaaacaattagtaataaaaattccaatcacaaaaattaaaaattactgtaaaaatccgttaaccaatccccggcaacggcgccaaaaacttgttgttcgatttatgcaaatgtgtatggcaagtgcaccgatcgttaacaagtaataaagtaggtaagtgagttatcgtctccacagggattggggtaatttttacaataatattaattctaaatgactggaattaaaacagaaaataagagataattgttgaattgatttgttgtttgaatagaaatagaaaataaatgcagtaaaaatataaaagaagttaccaatggaagaaacaattgtggtcaggcacaatcccctttgttcctacctccttcacttgattggtttattatcgtaaatcacacacatgataaatctttcctaaattcgtaaatcctagaactactagagtcataaccagcaatttaaccctttaattcgatcgagaaacctaaacccttagtgaatctgtcaaactaagtattcaaagaatatatctcatgtgatcttgttaagattattcgaaaaataagtcttttctaagttagttaatccctaatgtcttagtgaatcaaccctttaacccaattcaaaaacccaatttcttggtgaattctatcatgttaagcatgcaaaagatcatattataaaatccgtagccacgcatccctatgtctaggcgaagaacaactattattctaaacatgtcagaaattagaaccccaacgtgtccattgcgaatcctaaccctcaatacttaaatagaatggccaattccaaataagaataaaacattgaatagcacagagtagaataaaataatcaaaacagcattaaaaccaataccaattcaagttacagaggagttacatcagttcatggccttcccacaatacaagttcagcttgccataagcttcaagaaaccaaaggctgtcaaataatacattcttggtgaccttgccttgattcttgacctccaaaggtctagagaaaagaaaggaagagtagagaggtgtcagtatgtgtgtaagtgtgtgttgaaccccccccagaggcctttatttatagatagatttaattaaggtaacaaggcctattttctgttccaaatctaaatcaaatcttcttaattaaggaaactaaatatatttatagaatcacttaattaaggcaactaatcctaatataataccaaatcttgaaatatatgatttaaataaggaaactgtttcaacctcacgcgacccacgcgcgattccacgcgagtcgcgtggattggccgaaaagatggcgcttgtcgcgtgaaatgtgaagtgcctcgcgtggagtaacagaagagaattccttatttctttgagtcttcacgcgacccgcgtgacactccaagtatgtcgcgtggaatagcagcgttgaaatgcttaaatcttgaagttcccacgcgacccacttgagtaacggcgctacccgcgtgatcttctctggtcttccaagtggctcgcgtggatagtggcgcgactcgcgtgatactccagaatttgttttcttctttctttggcctttattctcctcttttgtcctgaaattgcataattgatattgaaataagataaaataaaataatattaataaactaaccaaaactaaactaaatcctaattatttaatcaaaacataagctaaaactattctaaaaataagatgtgtttgcaacacatcaatcactcttggatttcaaaaacaaagtccaagtgaatctagagaaatcatctacaataaccaatccatagtaattgccccccatactcacagttcttgaaggaccaaatagatctatgtgcaaaagttcaagtggtctagaggtggaaataatatttttactttgaaaagatgttttggtttgtttccccttttgacatgcatcacatagtttgtccttctcaaatttgagttttggtaggccaatgactaagtccctttttatgagcttattcatatgatgcatattgatatgactagctctcctatgccacagccatgtttcatctattttacacatcaagcatgtggttttgtgaaataatgcatggtctatagaaagcaagtaaacattacctttccttttgccaatgtaaattacctcttcactcttaccatcacaaattaaacaacaatcttgattgaagaagattttataacctttgtcacataattggctaatgctaagtaggttgtgcttcaatccctcaacatagagtacattgcttattttggtattcaagctatcaccaatgctaccttcaccaatgatttttcctctgttgttatctccataggtgacatagcccccatctttaaaaataagatttgagcaaggacatatcaccagtcatatgtcttgagcatccactatcaagataccatagagaagaggtatctctaagacatacctacaaaagaaacaaattacttcaagggagaaggtgcccatttacttttgggtccaagtgggttagctgttctctttttcttttctatccaaatgcactccccatttgggacataaaaccttcttacaaaacaatggtaagctgtatgacctctttccatacaatagtgacaagttacaacattgtatgattttttagagaacctcttttgattgactcttgtccttttctttttcttctgttttggagtacaaatgtagtcttttgaacatttttaaagcttcttttataccccaaaccagaagtatcaccaaactattttttgggcactcaacatatcatctaaatcacattttcctttgttgagtttttccaagatgtcaatcagttcttggttctttgaaaccaactgcaaatatttttcttcttgatttattctatactcatcaaacactttttgcagcatttcatacttgtcactagatgtggaggaagaggtgcaaacacatccacttgatttgtagcttgaagtaagtttttcatttcttccttcaagttacaaactttagtttgcaaatccattattttagcaagatgatcctcaataccttttttaagcctgttatttgatttagctagcttttttggcctctttgtgcttttcttgaaaagcaaaaatagcttggtcaagttcaaatgttacctcatcatcttcatctagaagatcatcattttcttcattgacaattgaggtgaggcacatgttggcttcttctaattcagtagaggattcagaggttgaagattcattgtcttcccatgcaatgtatgctcttcttgctttagcttccttcttgcctttgctgtcttgttgttgcttcttcaagtagattgagcattctgattttatgtggccaggtttgccacattcaaaacaagtaaagttgttgtcaatctttttattgttgctagagctgttgttggtggaattgttcttgttgtttcttgtaaaacttttgcccttgttcttcttcagatatttgatgaacttctttacaatcaagttcatgctttcatcttcttcttcatcactagagttttcatccttctctactttaggtgttgcagttttccgtgctattcctttgctttttctttctgcatcttcaccaaaagttagttgagacaattcaaattcatattcaagtaacttaccaaagagggcaaccatagtcattttcgaaagatctttagattccttgatggctgttatttttggttgccaagctctagtgaggcactttagaatcttgatgtttaattctttagcatcaaatgtttttccaaggcctaagagatgattcactatatgtgtgaaccttgtttggagctgagaaatgctttcattttgattcatcttgaacatttcatattcatgaatcaaagagtgcttccttgatctccttacttcctcagttccttcatgggtgatctcaagcatctcccacatttccttggcacttgtacatctaacagttttgaaaaattcatcagaggaaagggcagaggttatcatgttcttagctttaaaatcatattgaacaattcttttttaatcatgattcatctcatcccaatccttgggaatcatgttattatctacgaccttgatgggcaccctaggacctttttctatagcattccatgctcctggatcattggattgaataaagatcttcattctatttttccaaaaattgaaatgctccccctcaaataaaggaggtctgtttaaggatgcaccttccttgaaggttatttgtgaagtattcattttgaaataaaagtgattttgagtgtcttacaagacctagctcttgatgccaattgtaaaatataggaacacttcacacttaaccaagaaggggggggtgaattggttaggcttggtaatttaaaaatttattaaacaaaatcagagtttttgcccttttggatctttatcacaaacacaaccaagaacctttgtccaagaatcaacccaagagatgtaatgcttcaagaattaagtagttaataagaatttacataaaccaatcaaatatgcataattaaacaaacacacaaggaattatactggttcacttcaaacactatgaagctacatccagttttcttctactcaacactagagtaaagttccactattgcaaattttagttcttacaagattcttacaagtctctctttatcaaccctagataaatttcagagatctaaaaccctattagatctttagagaccaaacccagctaagaacactacccagcaacacttagagaaacactatctctaaaaatacaagcaagaacccaaaacacaatagacaaggcaatacaaatttcaacaaagaattacaacattcaaagattaaggaaagaaatcacctgatgatccaaagattgatatgcatgaaatgattttaccaggttaatgcaaacaacaaattcaaaacatggctttccttgatctttgaaaagaaaatcttgcttcactcaatccttaaacacctataagagttttgtgggagcaagagctttgtgaacccaaaaaaatcacttagagaatgtttagaaatctttagaatgctcagaattcgaattactcaagttgggaaaacagctgagcaatggttctatttataataatttttgtaaccgcttgtaatcgattaaatgcgctcctgtaatcgattatatacgctcctataatcgattaaagtgttcataaggattctgggtaaccacaacgagcactttaatcgattatcccaatgcgtaatcgattaaatccgaaatatatataaacatgaatgtactgtgtaatcgattacaataattggtaatcgattatatccgaaaatatgaaaaacatgtttgaactacgtaattgattacagtaattggtaatcgattaagccagagtgatgatataaactgtatgagtaatgtaatcgattacagatgagtagtaatcgattaaataagtcactaaggcagattctaagtgatcaaaggcaaaataatcgattattccgatagtgtaatcgattaaactgttcttaagaattttccagaaaacattaagaacaaaataatcgattctttgcttatattaatcaattaaaccagtgaaatgttatttttccaaaaacactttgtttatttcaagattcaaaataatttcctaataccttgtgatttaattcttgagcttatgaatgatatgaatgcaataatttggatcataagagaacttccttccttttacatttgatcacaagcttttcttcaaatcttcaaacatgttgaaagctcaaaacacttgtgatttaattcttgagcttatgaatgatatgaatgcaataatttggatcataagagaacttccttccttttacatttgatcacaagcttttcttcaaatcttcatacatgttgaaagctcaaaacacttccatgtcttcaaatctctttatgcttcaagtaactccccctcaaatcaacattgatatcatggctgataacaacctaactcttaaggagttagctacacctgatgttgtttaccaaccctagtgtattcaataccctgagactgaggtcagttatgaactgaaatctggactgatccatttgcttcctaagtttcatggacttgctggtgaagatccacataaacaccttaaggagtttcatgtggtgtgttccaccatgcgaccgcatgatgttcgtgaggattatgtcaagatgaaagcatttcctttctctttggatggtgttgctaaggattggttgtaccttcaaccagatcctatcaccacttggacagacatgaagagaagattcttagagaaattcttccctacctctagaacagcatccatccggaaggaaatttgtggcataaggcaattccctggagagtctttgtatgagtatcgggagagattcaacaagttgtgtgctacctgtcctctccatcaaatcagtgagcaattactgattcagtacttttatgaaggattgatgttgatggataggagtatgatagatgcagctagtggaggcgctctgatggacaagacccctcttactgcaaggcagttgatttctaacatggcagccaactatcaacaatttggtgctagaattacaacatctaaggtgatggctgcaaatgaagcttttgtctctatggttgctgataaccagagattggagaacaaattgactgagttgacatcccttgtgaggcagcttgctattgggcaacaacagaatgtgatggcagccaatcaaccaaggcttgtggtatttgttgtgcccctgatcatcccacagatgcatgccccactctccaagagacagaacaacctgctgaagtttctgccatgcaacctagccagtcattcagacctcaatagtagtataatccttactccaacatttataatcctggttgaagagatcatccaaatttgaggtatggtcctggtccacaacagcagcagccctttagacctccacagcaacccttccagcctgccactactaaataccaacctgctccttttagacaacagccatagttccagcaacctgcacctgcacctacacctaaacaacctgtgcaggctagttttggaccttccttggaggatttaatgaagcaaatggaaaccagcaatatccagtttcaacaaaatgtcagtgccaccatccaggacctgcagactcagattggatagttagctacaactgtaaaccaaatgcagcagcagggttctagtaaccttccagcacaaccagttgttaatcctaaaaatgtgagtgctattaccttgaggagtggcacagaacttccagatgctggtgctagaattgatgctggtgctagtaaaaaagttaataatggtgccaaaacagattctgcaccaaaacagattcccttaccttttccttctagagccattcctgcaaagaaagtggtggaacttgattctgatttgcttaagactttcaggagggtggaagtcaacaatcccctcttggatgccatcaagcatattccaaaatatgcaaagttcctgaaggatttgtgcacgcataagaggaagcttaagggaaatgagcaagtgaagatgggcaaaaatgtttctgcactgatacagggcaaaactgttgatgccatcccactatccaccttgccacagaagtgcaaggatcctggcactttcattgtcccatgcaccattggaaatattacttttgcagatgccttgtgtgatcttggagcctccattaatgtcatgcccacatcagtttacaaagcactacaccttggtgagatgaaacccactggtgttgtcatccacttagccaacaggagtgctgcacttccacttggacttattgaagatgtgctggtgccagttaataatttgatcttcccagcagatttttacattttggatatggagaatgagtcttccagccatagtcccacattgatcctagggagaccattcttgatgatagccaggaccaaaattgatgtgcatgcatgaactctttctatggagtttggtgatgacattgttcagtttaacatttttgaggctatgagacatcctgtagaggagcattatgtttttcttcttgatatcattgatgctgcaatagatagtgtagatatttctgacttactttttgatttttcttctgacttttctgagtttgatcttggttcttgtaattgtatctgtgatgattctgctgctgtgtgtagcatttgtgcagaaatttcctctgcacttcactttgattgtgttccaggtacagatccaagttctgagcctactatcccacttccctcagaccctagtctttccttaccttccactattcagcccccttccttggagcttaagtcactacctgagcacctcaagtatgcatatttagatgatgctcagaagctctcagtcatcatatctagtagtctgccactggaacatgaagaaaagttgatgcatgttttaagaggccacaaaaaggccattggatggacacttgctgatcttcctggaattaatccttccatctgcatgcatcagatacttttggaggatgattctagaccagtgaggcaaccccagtgttaggatttttcatggcaagcgcaccgttttatcgttgcaagtttacaaatttgtaaaagttcatctccacagggatttgagtttacgtcggttggtttaaattgttactagtttagtagtctatatacagatgataaaaaatagagattcatatgttggtttcgtgcgtaaagtaaaagtaaaagttgcggaaaataaatgattactgaaaataaacgaatacaagtcaaggaagtgtaggattggattttatcttgattatcccttttaattgattttacctatacatgttctattcttattgacgcacacatttatgtaaacttaattcgattcctcgcaattaagtcctaaggatattttgctaaatatcgatccctcgcatatttaattaaataccctagcattaagcttctaatcatgtgtttcgtgcgatcaaaacattaagccctattcctagcaacgtaacatagtgagtgatttaattcaattcaaaccctaaatttactttccagtcgcctttagggttaagttaatgaaactaatgattaattagaatcaagcgttaagcgtagaataaaatcaccaataaggaatagaaccatgcataaataattaaaagagcatagggataagaagagtacgtccaatccttaggaaagcttaagcgaacatcggtagaacctcctcgagagaaccactgactaagctcgtcatcgatcctcttttcggcagaatctccttatacaattcgctctacctcacttccctaagttctacactcacttaagaacaacaaacaacttaaatatgaacaagcaagtgattttgggagagaaaagtgataagtgccacatttcagtaaaactaggattacaatatggcacttatccgttattttaaattgaattaatcacaagataaccctaaaaacctagtcaaatgatgattatgtaaaggtaagtcatgcttttatgtttcaaaaagatttcgtccaattaattggttcaattttgctaggtctgaaggttacggaagaaccaagcttgcgaaactaggagcatggggtggactaagcaaaggaggggaagtttcaacaacaaaacaagcccaaaagacaccaaggcccatcaatttcttcaccattaagcttccaagtcgcccaggccagctcccatagttcatttcaatcgcccaggccactccaagttccaagaaactgaccttaactcgcccaggcgagtggaattaggccattttaggcgcctgggcgagtggtgtgaagcaggtggccaaaaactataaaaaggggttggccagaagagggaaatcaccattctttcactccttttctctcccaagcacttgcttgctcttgtttcttgcttttgttgttcctaagtgagtgtagaacttagggaagtgaggttgagtgacttttgtaaggagattctgccgaagagaggatcgatgatgagcttagtcggtgattctctcaaggaggttctgcccatgttcgcttaagcttctctaaggattggacacactcttcttattcctatgctcttttaattatttatgcatcgttctacttcttgttggtaatttcattctacgcttaatgcttgattccacttgatcactagggtcacgaacttaaattcctaagtgaaactggaaagtaatcttagggtttgaactgaatgaaattactcgttacgttacgttgctaggaatagggcataacgttttgatcgcatgaaacacgtgaatatgatcttaatgcttgggtatttaattaagtatacgagggattgatatttagtaaaatatccatagggcttaattgcgaggaatcgaattaaggttacctaaacgtgtgcgtcaacaagaatagaaaatgcataggtaaaatcaattaaagggataagcaagacgaaatccaatcctacattcacttgacttgtatccgtttatttatttcatttcccgtaatcgtttatttgttttccgttatctatgttttacattttctgcaaacaacaacaaatgaatcttcgccttttatatgtatataactactaaactgttaattttaaatcatccgacgtaaacccaaatccctgtggagacgaacttttataaattcaaaacttacagcgataacaacggtacgcttgccgtggtaaaatttctaacaaaaagcaatcaaaagcatgctctggccttcaaatttcgtctctatttatagatttcggggtcctgggtgctttggtcgcccaggccaccaatttcttcacaaaatgggctcttgggcgagttaggatgctgccttggaacttgttgctcgcctaggcgagaaaaataggcataaactggtcgcctgggcgagttagaatcttagtcttgaaggattctttgggccttgatgcttgtgcctggaatgctgtttgggacttcattctttgcttagttcactcccagctcttggttttcgcagcttgattcttccgtaacctttaaacctagcaaaattaaacatttgattggacgaaatcctttcaaaatacaaaagcataacttagcttaatataaccttcaattaactaggtttctagggttaacttgtgaataactcaattaaaataacggataagtgccatatttgaattctatttttactaaaatgtggcacttatcaactcctcccaacctagaatcttgcttgtcctcaagcaaaggtccgaatattgtaacaccccgtaggcctccgacgtgttatcattaataatatcagattagcgtataaaaatatcaattaaatcactcagcggaaacataggatcgttttcttgatacattatgtatggaaacacataacagaaccataaaatcaagcccctgctgatccagtttatcaaatcaaacataatacagacatataacaggttttataggcagagtaaccaaatacatcatatatactcagggaaagttatatatatatatatatatcatacaagttctgtacagacatatgcatcaaagtccacaccacacatgtcgtggtgctaccaaaagaatatcagccctccctgagggtatacagaaccatacaccaaaataaaatcaaaacagagccttcaagctcttcatgccgcttctccctcaagcagcctagtctcaattgggcctcctgccctgagacagatcttctcgaccagacgtgtcacctgaaattatgcaagccccacatggggtgagataatatatctcagtaagctcagggtccctgggaactcactcccaccctggctaacagattcacaatacacacatatcacatatcagtccaacatatcacatatggcccactggcctggccctctggcctcatcatatcaaatcaacatcatacaatcatcacatgacaggtggcagagctcctcgatgcctggcggagctcctcaacgccactgacggagctcctcaacgtcgtacctgtcatggtgtggcagagctcctcaacgcccagaatacacgacagagctcctcaatgtcggtattcatctattggccaacagatatctcaacacaacatgcatatatcaaatgcagatacatatcaatcaacatacacaatgtcatagccaatgcatgcagtatgaatcatgaccaccactccccaggagtgtggtgtgcaaccaaaacgggaattcatccccagagaacactgaacttacctggtagggtatctgactgaatctccttcccaggtctgtggctctggccaccaacagtctcaagctcacggcctaaccaaggcacatgaaatttcatatcaaaaccagcccacatgcttacaatcacagaacatatcacaatataaatcccctatcctagggtattatcaagctcagtccacttggggctactcagagacttccacaaggtcttttaggctagaggccaagctgctgagtcaagcttaactcatcacaaaacatacacagacatggccttatttcatcagcctcaaccaactcaattcctctggaatggcctaacctccaccaaggtgccattcaactagcctcacaggctcataacagacatattctgggctctggaatggcctctacactaatgtagatacaacacacaggccacacagacaaaccacagagccaaaatccaaagtcatcagaatcaaaaactgaaagctaatccttcatctattctaagccctgaacaacttactcaactggaccctgggctaattctagtcctagctcatatgggtcactattcacagagaccccccccagaatcaaaattaaacggtgaaacttgtgtttcttacctcagtggcgaatccaacagcctcagaacagcttcctctagcttctacgttccaattatgctgtggttctaagccaagctcaagttctctgagcttttccctctgaggttcctcttctcactcaatctggggttttcaaggaaattgatgaaggattcaagctttctaatcggttcaatcactattctaaggttcagggaagtgtttagggctcaaaacaaggtcctaggaagctggggcactcatcaatggagtttgagggctgtgggaggaagaagaagtaactttcctccatttctcacgttttgccccttttaattctgatctgccgacgttcccacgtgactcgcgccatctatccacgcgactcgcgccatctcttcgggccttccacgcgactcgcgtggatcccaagtgactcgcgtggagccccagtgaaaaaccatgctttctggaccacttcccacgcgactcacgtggatcttcacgcgactcgcgtcataccctcggccagcccacgcgactcgcgtgaacattcaagtggctcgcgtggcatggcagagccatctgccctgtattacacatatggcgcgcgtcgcgccacatcccaagtgggtcgcgccatatgccagaaccaccttaacacttgcatttaaacctctttctacagggttctaaggcatactcatattccttaacccttaaacttcgattcatgcttaatctaagcttaaacatacgcttatgaatttaagctattacatttggcgctatcagcgccaatcctggcgccaccggcgccgcacccttagcagggtttcctgacctgaatccccgcgctatcgcgcggggttaagcgccgaaaataaaagtccttacaaatatcatgctttgacaagaatcaacttaatttttgatcagaacaaatttttcaaaaagtagttaaccttgatactttgagaaacaaaatgatggattttcatgaaatcaaaatgaggttatagtcaactttacactttatttcaaaaagacctcagaggaaacatttgactgatttcaaacagaggaaaacctctcaataagtgtttaattctcccacaggtaagtgtttagtctcacatctatcactgatatatcatagataaattttgcagttcatttcccatcaaatcataatacatactcatcatggatcattaggtcttttatggctaggcttggctaaaaagaaatcttggtttttctggatattcaaatgaccttgggtttaggagagcaaatagagacatttagatcattacctcctattccttttctctttttccaagatatctattttctttttcacccactttttatcacaaggaattttattttcttccttttctttttcttttttcattattcattcattttttcttttcttttctttttcttttctctttcttttgtttttcttttctttttcattaatcacaaaaaaaccactttaaaaatccttttcataacatgaacttcccaaaaaaatttccatcacaacttattcccttcttgctctcctaaccttaggtaaggtatggaattcctatcctaggctagggtttcaataaaatatcaactgttaaggctcaaagggggttgcaaaggataaatctttatatattattgggatagctttttggctagtggcttgtaatatgtttaaaaagaaagatggcctcaatcatatctatgaatcatatgcttaagacaattagaaattcatggaaaattactataaatcatatcagtgatatctctgtgtgtataatatctttttggatgcacacactctcttgggttttaaggtctgttttcatgttttcaatcaaatcatttgtttcccactgaagttatttatcgatttccatgtaaaaagacttttaccttgtttttgatttttctgaagaaaccatttatttgtttttcatttctcaagattttcctacaaaaacttttatttttgtttgttctgattctttaaaagaagtttcaaaacaattttcagttgatttttttcaaaacataatatatcaaaaagattttttttttcatttttaccaaaaaaaatttgtcctaaattactatttttatttacaaaatcatgtttagacgcaaaaatactatgttacactttcccaaaaagttttacctaaatatgcactgcttcatcataggctatatacgaaatagttatcaaaatagtaacataattactgtaattcaaccatcactgcccatgtgcatcaaaaagtaaccatgatagtgcataaacagagtaaaccaacataaatagagtaaaccaaaatatgtaagtatgtagaaagccataaagaaagcgataaataaatcaaaaagagtgtcacagattttgcaggtccgtaagatatgctgccagatcttgctccaaatcatccgccgcctctcctccttctgctgctgctgtagctgtagggtcttcagctgcagggtcctgctgagctgtggagcctcccacctcctcctgaaaaattggcctgtccctaggccatgctacatgtgctataaactgatcgggagtaggccatgggaatgggctaggatcctgtcggtgttgatgcagtgtgtagtggtgtaaactttcctttagctgcatctgtcctctgaagttggcagcttgttgctctgctaagtgctgcatgtacgtgtgcatttgaagttccattctctgcatgttggcagagatagactccaaagtagctggctcatgagcgggttgctgctctacctgtctagctaaacaatatttttcaataaaagcgcggttaattggagggcggatggtcctagaagggtgtacttggattccataaaactgacatagaccagtaattagtgtcgggaatccaattgccctgttggctcgctctgggttaagtggatgcctaggtggctctaagattacaaactggtgaatatcatcagagattatttgagccacgtcaatgctaagctgagttataatactaaaggctagttgacacttcagcataggaagatcaaagttatggtcactaggcaaaatattgctcaacagaaaggtcatccaaatttgggtaaaggtggtcatatttgttctcattaatcttaccctgttacctgctgtgctgcgagcgaagtcactccctggaatgcatagaagctgtctcatttcttcttcgtcaaagttgttatgcctttccatgtattcacagagatgtccttctgggaggaccagtggattgcctagaaactgatttatggcatcagcatcatagggaatccactatctctgacaaatgagcgcttgtcacgcgatgcttcctccacaggccatgcattggcataaaattctagcacaatttcagggtcgaatttctgcaatggtgtagctagtggtctccatctacatcgttcaagttcagctgtaaattctggatattcctcatttaatagctgaacccttctctctttaaggaaagaccaattcttgattgtttaaaacctgagttggtgctctttgcttctaaacctctgctcatcataaataaaatcctcaggtggaggtgcactggaaccttcattgcgagccctcttattctgtaatttctttggagccatctgaaacaatagctttacaaacagattttagcatttaacaacataatagataagtggcagccttttgtgcagtggactcaagacactttttaatatagttaacaattacctaggctctaatgcacaagtgtaagcacaaaattcagtccatgatttaattttatgtacaatgatcatgtttggagaatgatactacatgctgaattgtttcaaatttacaactttggtatgttaataagttcaccaaaatgacaagtcatagtcatgcacaaaatgcaaaaattgcttcctctattggaatgctatgcctaagtgattgtaacaccccgtgtgcacccagtgtgttaacattactataatatcagaatagcacaaaattctatactaaacgcatcaatgttgcggaagcatacatggatcacatttcttgatacattatgtatggtataaaacatgaatataaatcaaattcataacaactagcccttattgatccagataatcaaagaaaatcaggcagacaactagatataacaggagacagaaagctaccttattctggatggtaagcaccacagggaaccttaaagctctccaccctgctggtattctccacaaggaatttatcccagctgctaggatccatacctgcaacataaccccccacggggtgagatatcaatctcagtaagccagggttcttagaggtctttcctccccctggttcactatcaaacatctaacatcataatttggcttatccacaaccctcttaatcctctagccacatctctctcataatgcatattatgcatgcctaacgaggcctgtacactcaacatctgcactgagagatcatatgtcaggtaatagactctctcaagctctcagatcttaatcctcatctcatatcataactaccagccatctcggctttctcatctcataactattaaactaaaacctatttagagaataggctctctgtaatctaatccaaggcctggggataaacatttgacaggcataaatcccctggaacctactgtcctctatctcatacctgaggaggatcatccattaagggctctccactcgactcaggataactctaatcacaatacctgaggaggatcatccataaatgggctctccactcgctcagggctttgtcacacattgcctgaggaatctctcaactcaagactttcacacacagagtacctgaataggatcatccgccatgcgggtacatctactcaggacttgccgcccaacacctgaataggatcatccaccgagtgggtacatctactcaggagtggctctatctatgcctgaataggatcatccaccaagtaggtacatctactcaggacttgccgcccaacacctgaataggatcatccaccgagtgggtacatctactcaggatttacatggacgcccatggattatcccaaggaagatcatccatcgagtgggtacattcccatggggtccatagtccactattctctggccagagaatgcacacccaatactcataaacaatacaaggcatgacactttcacattatcaatctaacagcaagaccaacatgccataacggcattacctcaatatacatcacaacaccatcacggtgtttcactatcataattatcatcatacaacatcaaggtgcctggcatgtcatatagaactattatcaatatgcaacataacactctcgcagtgttagcttatcatcaggcaccgaacactaacacaatgctcatctcatcactagaacatcaggggtatatctcttatacccaatacagttcaatcctctatcctagtgtttggctgcactagttatcacatacatgtcttatacacctataagaccaaataatatcatacctaacaccatcacagtgctaggatcatcatcaaccatcctacaataatatcaaaatcagaacactaacctagtgctcatattcaccgcaatccatataattaaatagatagtgaccccaagcagggaaatcactccaagaaacactgaacttacctggtgtgaccatgctttatcctctatcttcatctggctggtccatgccgctgataccatcgtgccttgccctattcaattatgcagcacagtcacattagaaccactataccaggtatctaacaacggtactcaaccattgaaatgaaaggaaacaaaattcctttccataacttctcaatcaactaacttagggttatcagcctaatcactgcataggcccccctcacagatcctcaacaggatcattctcagcctgaccatggccctagagtcttagcaagactctatatcagacaatccattggtctatctgtgcctaactcgccagttattcatcttggccaaaaccaacatatcaatgcatattcaccgtttatttggcctcatgaacaattcttataaaggcatataagttcattcctatctcaaagtcttccatttactcaatcttttcctgcttaactcattctcagggtcaaatccaaacttcattagaattccagtttcaaggtatcatattcctcagaacaccctcctgatcatacttttctaaagaacctaagtctaattccagccctatcacaaaatggttactattcaccccattacccaaatcacaaataactagagaaaacttgagtttcttacctcaaagcagtcgaggaaggccgaatgattgcctctccaagcctcagtattccatgggctgccttcttttctctctaaactcagctttctgtggtttctcaggaaatgggttttctttcaaatcttaggctgaaatttagctcacataaggttctagtcttgttttagggtgattaggaggtgtttaggtgaggtgtgatgaagttgtggagctcccaagctcatccatggctgcctgggtcagaggaagaagaagaacaggggtttttccccttcaaaacgcaaaaatggccttaaatactaggtctgccgacattccagcgctaatcgagccatatctggcactaatcgcgccagttattcgaatcaaaagggtctccagaccatactggcgctaaccgcgccataaatggtgctaatcgcgccaactgggagcatctgtggcgctactggcgccactcggcgccaaaagtcgtgaaaaaatagacttctactacagtgccacgctattagcgccaagctacagtgcagctacagtaaaatattattattttattaattttaatttttttttaaactttggttattacagtgatgatcaatgtcatgtaagaaaagtgtttaggactagcatagaacatatttggtgcattaataatgtgctaataagaagctgttttgggtgtggcatttcaacaaacagttggtatgcacccatttttgttcatgaagttggtgaaattggttcatgctttcactccaattttcaaagaaataagatggagaggtgaccaatttggatatgtacaacaaaagtgctcaaaacagaacaaaaatcatcatttaatatttctaacctagacatgaaaagaaaggaaaagaatgctaaatgcaagcatacaagcataaaaagagagataatattcaaaacttgaattgatgcacgaaggggatacttacttggaaccaaaaggcaagaagaagcaaagtaatggagggtatagcagcagcctgggcgagcttgaatgagcaggaaagggaaaacacggcaaggtaacaaaagatgaaagtgaaattttgaactttttgattttcaccttgctgttttgtggccaggattcgtgacctcgcccaggcggccattttggcctatattcactcgcctgtgcgagttaaacagccaaaaaaaaaatatatatatatatatatatatatattttggggatacttatactatgttaaaagtacttaattatttatattctaccctatatttactatttttagaaatatatatatacataaatatttataataaaaacataagaaaatatttacaaacatacctgactaggttgcctcctagaagcgcttcttttacgtcgtattagctggacgcattgcagctcaaatgtcttgacgttgtatcacagttgtgagcctttcaaattcaccacctagatatggcttgagtctgcttccatttacagtccacgttctttttgtactggggtcctcgagtatcacaactccatgtggcttgacttcctttataatgaaaggtccagaccattttgacttcaactttcctggaaacaatcttaatcgagagttaaataacaaaacattttgtccaggatgaaaattcctttttaaaagctttttatcatgataaaatttaactttttctttgtaaagctttgaattctcataagctgagagcctcatttcttccagttgatgcaattgtagcttcctttgttcacctgcaaggttagtgtcaaaattaaagaattttaaggcccagaaagttttatgttctagttccactggtaagtggcaagatttgccataaaccagttgaaatggggtaagcccagtgggtgctttgaaagcggtttggtatgcccaaagagcttcatcaagtttgtgagaccaatccttgcctgactgggcaactgtcttttctaaaattctcttgatttctctgttggaaacttcagcttgcccattagtctgtgggtgataaggagaagctactttatgtcgaacaccataatgctggaggaccttttgaagttgggcattacagaaatgtgatcctccgtcactgatgagtacacgcggtgttccaaatcgagcaaaaatatttctcatcaagaagcggataactgcttttgaataagctttttgtacaactactgcttcaacccatttggtcacatagtccactgctaacaagatatattcattggagtatgaagatggaaacggaccaatgaaatcaattctccaacagtcaaaggcttcaatttctaagatattttctagaggcatttcattccttttagatattcctccggtcctttggcaattatcacatctttgcacgtattcatgggcatctttacacaatgttggccaatagaaacctgcttgcagaatctttgccgcagttatttctccattataatgccccccataaggtgagttgtgacaatgccacagaatgttccttgcctcttcttggttcacacatcttctcaataggttatctgcaccaatcttgaaaaggtaaggatcgtcccatacaaaatacttagcatcactgagaaacttcctcttttggtgccaagaataatcctcagggattgcacctactgccttaaaattagccatttctgcaaaccatggcctttcagaaatatgaaggagtttctcatcggggaattcttcttgtatgtctagatctagggaggcttcatttgtgagtctagataaatgatcaaccacataattctcacaccctttcttatcctttatttctaaatcaaattcctgcagcaataaaatccatcggataagtctaggtttagaatcagttttaaccaataaatacttgattgcagcatgatctgtgtaaatcaccaccattgattcaattagataagatctaaatttttccaaggcatatactatgtgttgcgaaaatcgcacaatatggcaaatgcactgatcgttacaagtaataaagtgggtaagtagagtatcgttctccacaaggattggggtgaaattcacagtaatattaattctatgtgattggaggtaaaaagaaaatatttttggataatagttgtgtgttgaagatttgaatagaaaactgaaataaaaattaacagtaaagtagttgaagtattaccaatggaagaaacaattgtggtcaggcacaatccctaatgttcactacctctttcacttaactgggttatcaaatttgatcacaaatgacaaatctctcctatattcgtaaatcctagataactagcgattcagccctttaatccgatcgagaaccctaagcccttagcgattctgtcaaactaagcatttagagaacatatcataagggtttccgaattcttttgctcggagaataaatctttcctactctagttaatccctaattccttagtgaattaaccctttaacccgaatcaaagacccaattccttggtgaaatctatcaagttaagcatataaaagactatattataaagttccgcagccacgcatccctatccctaggtgatgaacaactattattttactaaggtcagaaattagaatcccaacgtccccattgcgaatcctaaccctcaatatctaaatagaatggccagttctaaataagaattaaacaataaagagcagagtaaaataaaacaataagaattctcattcaataccagtcaagttacagaggagtttacatcagttcatgaccttcccacaatacaaggtttagcctgccataggcttcaaagaaaccaaagctgtcaaataactcattattctgcagtgacctagccttgattcttgccttccaatggtgtagaatgatgtatagaagtgtagaggtgtggaatggtgtgtaggtgtattttcttcagtccagaggcctttatttatagatagatttaattagagtaactaggcccttattctgtgccaatttcgaattgaatcttgttaaataaggaaacagcgattccgtggccctgatggcgcggcttgcggcgctactcgcgccgttgattcgaatttgtggcgctgatcgcgtggagtccggcgctgatcgcgcggggctttcgaaacagaagctctgattttgcttgtggcacggttcgcgcgaggtctggcgcgacccgcgtgggacttcaaatttgcttttctccctcctttggctttaattctcctcctttaagccctaaaatgcacaaatggtgatgaaatgagattaaattaaatataataataaactaactaattttattctaattcctaacttatttatctaaattataatctaaaactagcctaaaactaagatgtgtttgcaacacatcaaacaattctcagatttaatagttgctatcctcagcaacaaacagaacatcaaagaataagcaaggatctatgatcaaacaaaaccacaatccacaatcctagaattcatcatgctgagtataatcaattcatatcaaagcttccatagtactttcaaatctgtcaattagggagagtaacttgagtattcctcacagacatgtgtttattcactcatgcactcaagtgtatcaggctgatcaatctctcactcaacatagtcacagcattaccataagcttgaaaatattctcaacagatgcaagcataatttgatcaaaaggtcttttaggcttgtaacttggctgggctaagggtaggaaaatctttggaaaagtagctaatatgaggctagatccagtcccttaagtccaatcctgtagtcttccatattccttgttcattctcttcaaacctggtactttattcaacaatttattcttaatgataaataaaataaaacaaagcaataactttctttttggattttctttttctttttcttttctttcaaaatacagccactttcagacttccagctaataatttcaggcttattatttttcaactggcctgtgctcatttattcttgttattccataccaattgaattcaacttgttttccttcatgccttgatgaacacttccctgtttttctgctatcatggacttgtattgtaccttctctagcctcagggggtttggtcaatggatatagctctgatttgggtaacagaaatgaaaggttaaagctcaaaaataggtacaaatggaaagtaattgaaggtaagtcatttttggccctggtttttagaagaagaatatgccttaatcatgtcaagtcacacctgcatccagagaaacaattcaagttctagaatactatgaaaatggagtctctcaggagaaacataattaatgtttggctcaaaatctcacaggtgctaaactcaagtcaatccctgctgacttcatttcaagcaacacttcaacttcaacatgcatatcatataccaacaatcacaattccattcatgtgtcatgcaattcatgttatgtttcatttcacacaagcttttatcaaagaaatcctatctattactgtgtccattcactttttagttctgaaaaatttgatgtgctgccacctttattgaattattcagctaaaatttgaaactaacgattaaaacaaaaattttctgttggacatcctttgttttcctgactgtgattcagcaaataatgcatatgcacccattcccagatttagaaaattgccgtcctcagcaataagtaaaaatgattatgtgctgctaaaactcaacgatggatgcattatttgagaatcataactagaacgaacattaatccaaacagaacttatttaaaacagctaactaacaaaacagttaaactaaagcatactgaaaattaaaagtaaaaacagtaaaacaaaataaatggtcctgttctgtcaatttgttgtcaggtgtagctgcactttccttcttgtctttcttaatctgtgcacctgaactcagaaaccatatacctgctgcagtggctgaatttccagatttattcttttcattggttcagattcagctagactgtgcattagtgattggtattcaaaataaacaacatagtttttaacacagcaaatatgtgtacaagcatctgggaaatcaatctgctcagaattctgcagtgtgcttatgattcccagatttttttcattacatagtgtcacatcaccagctgtcggttgttcacttggggtcacaatttgtaatgttatcactcagttaaacataaaccccaaataggtctcagacacctgcaaattcagattataaatgcaagccaagctacaagtatcagagagcaattagcattcagcaaggcttaccattgtggattcccagatttaaattcaggcatatcacaaaatgatacaataaaattcatcatcctccatggatatgcatagcaacaattcccagatttaattcattgcatgtactcagtcaagtgtaattcaatattttatgtagatatcatttccatttcatcattgaccaataaacaatctgcacattattacatggaattgactagctttacctggattcccagatttaaggtccttacctccacccaaattcagaattcaaatattcatgcaagcatagccctaacattaataagcaattcacatttcaagcaattagggtgtctgcaggttttacaattttagttcaatcatgcacaggacttaaacccaatattattcatgtcctaagactagcctcaatgattcccagctttgggacattgcatgttcaggcccaattcaagttctaataatcaattaaatttaaaacagttttcaaaatcccgcgcgatcagcgtggcatctgacgcgatccgcgcgggaatacactggaagggttttcagctcgaaaacttggcgcgattagcactggggttcacgcgaatagcgtgaagtgaccgtggctatggcgcggtcagtgtcagtcttggcgcgattagcgccagatcatgcagatggaagctcagggtcgaatggatgacgtgaccagcgcgaacttcacgcgattagcgtggattggccgagtcattggcgcggatcgcgccacacttctaacaggccttttctctttctttttaaattctttttgtacttaactaaaaatgcaataatcctaaatgcctaaaatttaacatgcatgaagtataaatctactgctatcaaattaaaaacagaacttaaaaacatgtatttacatcgaaagattgctcgtttaacgtcttaagctagacgcatcctgcagtttaatcattagtggatttaagtggaataggagctgtggttccatccacttggctttcagaataaggtttcagccgacatttgttaactttaaagggtttgcccttgtctaatgatgtgatttctattgttccataagagcaaatcttttgcaccaagaaaggaccagaccaaaagaattctgacttacctggaaatttcaggcgatattttgatagcatcacactttgtcctggctcaatttctttgttgcgccacttcttgatcttcttcttcttgcaagtcctagcattttcatctgcagctacatgtattttgcttgcaggttgatgctctctttgtgtagtatccagcattttggcacatttcttctcagaggttttcacagcctttgctgcaatctttttcagcttaacctttggtgtttcagctggaatatcatcttcctttttctgcagcacttccagcataggttcaataatttctgctatagattcttggtctgcaatgttcaatttttcagcaatgcctgctgctacactttcagcttctgctgaattttcttctgcattatttgttgtggcatcatgttctgcatttccatctaaattttctgctgatgtattttctgcatctattatacctgcacaattcatgttatccagcaaatctaatctagaacaattatgtgtgtcagatggatcttttacagtattaaaaacattaaaaacaacagactcattatccatcctaagttctaattttccttgttctacatcaatcaaggctctagcagttgctaaaaaggatctccctaacagcagagggatttcactttccccttccatgtctaacacaataaagtctgtagggaatatgaatttgtctaccttcactaaaacatcctcaatcacccctgagggtttccttaaagacctatctgctagttgcaaggatactctagtaggttttaattcagttatgcctaaggacttacacattgataatggcattaagtttatactagcccctaagtcacatagtgccctccctatattgatatttcctatagctatagggatattaaaacttccagggtctttcaatttctttggaagctttctcaaaatgatggcactgcactcctcagtaagtgctatggtttcacagtccttcagcttatgtttcttagacagaagttctttcatgaattttgcataattaggcatattggctaatgcctcagcaaatggaatatttatatgtaacttcttaaacatgtctaagaacctggcaaactgctgctgctgaatttgttgcttggtttgcaccggatatggaggcttctcaaagcgaaagaaatcccattgcttctttggaggtgcagtatttttctcctttttcttgttatctgcagctttttctttttctgcttcagttgctgaatttttctgctcagcttctctattgcttacctcaggcttttctgatggaatgagcaccttaccactcctggtggtgatagcattgacatgttcccttggatttgtcactgtgtcactggggaactgtccttgtggcctctcagaaatttgtttcaccaattgaccaatttgaatttcaagattccggatggaggcatcttgatttctgtgatgagctctagtctcagctataaattctgttgttgtttgtgacagctgcatcactaccttctcaagttcagagatactagtggttggaatgggaggaggctgtagataatgactggacttatagtctaatcctcctccttgagtgttcctctggtagttgtttcctgcagcaaaattgttgtttctctggtatggctgctgctgtctttgataattccaaacgccattaacctgcacaggatcagctccaacaagaatagggcattgattagattcatgctcaacttggcagtattcgcagtagacatgtggcttactggctgaaacttgggctacagagacttgaagtctatcaattttttcattcaatttagccagctgttgggctaaaattttctgctctgcaagcatggcatcattgctgcacaattgtattggttctctctttggctgaatggtgatgctttcattttcagtacaagccagagatttaatcagctcataggtttgagctgtagtttttgaccttattgtgccccctgctgcaacattaacaatcatacgagtttcaggagtcataccgttaaagaaaatacgtatctgcttacccacaggcatgtcatattgtgggcatctcctgatcaattcttgaaatctattccatgcagcacatagggattctcttccattctaagtaaaattggtgatttcattcaccaaccggttatatttatccaaggaaaagtattgggcaaagaatcttgagactaagtcctcccaagttgagatgctatttgatgtttgtcggttcagccatctcaatgcatttcccttaacagcaaaagggaataggcttaatctcactgcatcatctgagaccccttagtgtcttatagtatcacagattctcagaaatctgtctatgaaatcatgagtgtaacgcctctctttaccctctcgtgcttggtttattttagataaaatattgtgtttactttgtattggaatcaaattagttataaattttttcacgaaaaaaaaatcctttttctctttgcttgcaagtttgtgtaatttatttgtaacaaaagcgtctttccctcaccacgatccatataattatagtcctttaatacaaatgaaattattaaacagtccaggtatagtcccaaataattcatcaccaaacaacttaatacagacagcgcagcaccaaatacagatcaaagtatagatcatcaaaacagaaaatcatcacacaagcttcatcacatcttctcgtacatcgtccatatcactgttcctctgcttgcccaaataagttggggtcatcacaggtgtcaaccaccgacacaaataggggttagtacatgataaacaaaatttaaatataaacagacataaatatacataagagttaagtaataatacagaggatttatttaatatgtttactaaaatttaattattatttactcatcacatgtattaaatcatcttctttttttttccacacaaatacttgtcatgaaatgcaaaagaatgcatgctcatcttattatatgatgcatgactgagatctcagcttctcaacgtctcagcgtctcaataattgtggccacagtcagataaccccaccctcaccttagtggaacgaacttatccatcccgtcagggtagtccagtgtcgcgtaggagtatcactcccatccatgtgatcatcatggtggtgtggtcctccctgtctcaactacccccaagtttaaaacacgtatggaactcagtttagttatctgacacacacacctcttcatgaggatcatctcatcgtctcaaattctaccccaccgggtagatgcacatgaagatgcacaaatgatttattttttcatcttttaattattctttttcatcactactcaatatcattatagagtcatcacagggtcatcacaatatcatcacagggtcatcacaactcaagatcattgatcgcagccgtacgcaaccaaattaatatgaattaaatgtagtactaggaagttgattcctaggtcgtctctcaaggatcaattgtcaatgtttaaggattgaaaacgtgttggggggttttttgatagaattgggcagaaattaaatttgaaattaaaacagaaataattagaaacgaattgcagtaattaaaaacgaattgcaataattaaaaacaagtcaaaccctagaacagattgcgcctctaatatccttgattcacgaaagatgatctgttccacttaattcttatcagtccaggttaatcaactaagcgaagattaacctaaaacgtcaattcacgaattaagcaaacgtgaatctcgttaaggcaatttctcagaattaagcaaactgagattaacaactcagaatcattaagcatgaaacgaattgcatacagaaccctaacaagaacaaatcaagcagaaccgaaattcaacacagaaacctccattaaaggtctgcaatctgcttagggttcaactctagggtttagccttccattaaattgaaattaacaacagaaatgaattgtgcattgaaactgaacatatcgaaaccttaaatagcagtaaacgaaaatggaacagaaaacgaaattcaactcaacagaaaacgaaaatgaaaatagatgaagcagaatagaattcgaaaagaatagatagaacagaaaacgaaaattgcttctaaatataaaatctcaacgaaagtagaaacagcaggaaacgaaaaattagaaaaataaagaagaaagcagaaaacgaaaataaacctaaaacctaaaaacgaaaatggtctgtagaatgtagagtgtgtagagtctccctctctcttctgacggcataagctaaatatatagaaactgcctaacctagacgaatgggctaaccctaacaaattcagcccagaaaattactaaaataaataaaaaacgaaattaattaaaactgatgttgacgtggcgctaatcttcagtccataaataagttccaagctcaattaattgttaaactgccctgaaaataaaaattagaataattaaacttaaaataatccaaattaattaaaatccgaattatcggtccaattaaatcctaaataagaaacagtgcaaaatatagatatttaaacacaactagggattaaaatgagtatagaaagatgagtaaatagtaataaatagtgactcatcaatcatcacagggttcacttctcatcatcatgaatcatccaacaatatgtcactttattattaaggattacttattaacacataagttttatttttttccatcttcaccacacataaaatattttccaagacacatgaaataaacactactaataatactcatacccagtcataccaagtttcacaaagcttcatcataccacacaactttccctttataaaactttggttttaaaactaaacttttagctacatacttcaacattattatctctacttaaataatcataattttgatttacaataacaaaaggaataattaaaagattaacaacatcaaaataaattactaagggatttattaacaacaacaaatgaagtaattaaaagatgatcaacaacaataaaataaatgattaaaagattaccaacaacaaataaatagttaagagattggttaaagaaacatttcaaaataaactatcttatatgttatctataattcatgaaaccttaccaaataaacttattcaaagtccatctatactatctataaccaaaataattttccataaatcccaactattaaacatcaaatagagagttagtttaaacttatttatctcatccttcataaaattttgatgaaaatctcatattatcttagttttccattatcaactcaaatttttattaacctaagtagttagctttgtttagagttaagtttatatttaaacttgtttatcaaagacttccccatacctcaaatgttttctaaaacttgaacaagcttgtttctttgctcccttgctccctttttctatgtggcttacttggccttttggaatgtttttgtttatgaaagtgataacaaaggatggtattataatgggtacggtgaaggcttggtattttggatttacaaagctaaaacaaaagcaagtgggatgacttggaaagcttgcacggatgcttcttgaatttggtttaaaagtgttttaattttgttttgaaatagaaaaacttggagtttgtacgttctactctcctcccccttccttaagtgcaccatcacttggctttttatagaatgaaagacttattttatgtaagaaaaatcttcaaatagtaattatgacttgctttacaattggtttaatttaattggctaaccaatccttgccttccatgtgtatggttcttgaattctcccaccacctccttatttagcttccgtgcacttcactagataaagcctttgatttttgcacggtttgtagctcctttggatgagcttaagttgatttttctccacttgcatttattacatattcctattgtcccttatcttagctttaccattaatggctttgtctccaattatgcttcttctttacacatgcttgttgttaattggctactcctttcattctttgcattggccccttccttccattcttggcttatctcacgtgaactttcattaagggctgccaatgattaaatttttttttcttctttctcttttctccaccgtagcaaactccctaagtgccaaataatgttttcttttactctatatttggatattttgggattctagtgatcttatttgcacatggttttattaataatttcattcttcttatccaatcttgatttttttcattcctttctccttttactcacacggccaaatattcctccaaagaccaaagctactataatttcttttaaatagcaaaatcctatttcttgttggtttatttcttttcaattaataaaattactaaactatcttagtaaagtcatttatttatcccaaaattaatataatactctaaggattataactatcatttttctatagttttctgatacctgaggtaatctggattgagctctattccacaatatttactaaaattcataaaaatcttaccatataatttctcttcacttatttagtcaatgaatgatcatctacaagtattctatcccatactcgggttcccacaaatttctaaagtcatttggtcagtgtttgacctaaagggtattttggtcatttaccaccctagggacaaaatcgtcatttccaaaaatgttcaaggaaactctgtaattgtcaccctaagggtattctgatcatttttcaaacatcccagagtatttataaaatttcctccttcaaatatcttgttaaaatagctaggggcaatttggtcattttcaaaatatctaggggtattttcgtcattttccttaaattcttctgtactgtctctagttaatatcttaccccaataattgactgtaattccaaaattttggggtgttacaatgagggtcttcaaaatcttctccaccaaattgacttctttccaccaatacaatcaatgaaggatttatatcaaaatgattagcttgtattggtggccttacaatgctggagtttggtcttgtgaacataggagccaaaatatcctccatcagttcatcctccggtcttcaccttggctgattattttgttcttcagccatctctacttcagactctaatcctagaattgaatcaaagtcaaagtattcagcttctcttctcctttgtttggctagtctccttcggaatgttctttcaatttcaggatcgaactgtaaatccttagggttaactgaacctcgcataaaactcaaagaagcaattagtaacaaaaattccaatcacaaatattaaaaattactgtaaaaatctgtttgccaatccccgacaatggcgccaaaaacttgttgcgaaaatcgcacaatacggcaagtgcaccgatcgttacaagcaataaagtgggtaagtagagtatcgttctccacaaggattggggtgaaattcacagtaatattaattctatgtgattggaggtaaaaagacacagaattttgctttaatgatgcttgtcttgaagcctttaacaccttaaagcacaaactcaccactgcacctgttttgatagctccagattggagtttgccttttgaacgaatgtgtgatgctagtgcttatgcagtaggtgcagttttaggacagcggaaggaaaagcgcttgcatgttatatattatgctagtaagatcttgaatgaggcataagtaaattatgccgccacttaaaaagagatgctagttgtggtgtatgccttagataagtttagatcatatttagtaggctctaaagtgattgtgtacactgaccatgcaaaaccacgcttgctgcgttggatgcttttattgcaggaatttgacttagagataagagacaaagctggagtagagaacaaagttgctgaccacttgtctaggattcaggagaaagacttgcaagatggaccagagtttgaaatcaatgaatctttccctgatgagcaagtgcttgttgtgcaattcagtccatggtttgaaaatatggccaactttaaagctgctggaattatacttgaggatttaaattggcagcagcgcaagaagttcttgcatgatgcgagaaggtacttctgggataacccttacttgtattttcaatgcactgacaatgttatccgcagatgtgtagctgaaagcgacgtgccagatattccgtggcactgtcattcctctaattatggagatcatttaggagcaaacaggactacacacaaagtgctgcaatgtggctattattggccaacacttttcaaggattccaagaactttgtgctgcagtgtgatagctgtcaaaggataggtaatatatctcacggagatgagatgccactgaacaacatccaagaagttgagctgcttgatgtatggggcattgattttatgggacctttccctaagtcattctccaaccaatacatcttggttgttgtggattatgtctccaagtgggttgaggcagctgctttacccaccaatgatgccaaggtggtggtctcgttcttgaggaataacatattcaccagatttggggtgccgagagcaatcataagtgatggaggaactcacttttgcaacaagcaatttgacagcttcttggcaaagtatggagtcaaacacaaggtggcaaccccttatcaccctcaaacaagtggccaagtagagatttccaatagagaattgaagcgaatacttgagaaaaatgttggaacatcaagaaaggactggtctaagaagctagatgatgctttatgggcatacagaaccgcatttaaaaccctataggtatgtctctctttcagcttgtctatggtaaggcttgccatctccctattgaacttgaacataaagcaatttgggcaaccaagtttttaaattttgaactgacaaaagctaatgaaaagaggttgcttcagttgaatgaattagatgagtttaggttagctgcatatgacaatgccagaatctacaaagaaaagacaaagaagtggcatgacaaccaaatccgtccaaaggagtttgttcctagccaacaagtgctgctatacaattctcgcctgcgactctttccaagtaaattgaaatcatgttggtctggaccgttccttgtacgagaggtgaatccttatggcacagtggcaatctcacctttggatagtgacagagctttcaaggtaaacggttatcgcttgaaacattattttgggggagatgtggacagaaattcagtttctgttccactcaaaaccactgaggtttgaactgaagaaagcgtctagcttaagacgttaaacgagcacactgttaatgtacatagcattttaagttttgtttaaaatttctagcagtaaatttatcattctgcagtcttgtcattatgcataatagtcactttaggtacatgcattagtaattaggcattcaaattatttcaaattttgatagcttaggttcatcattttacatgtttcaattatagtcaatttaggtagcattttatttaagtcaataaaattaaaagctaaataaaaagcaaggaaaagggctgaaaaagatgtggcgcgactcgcgccaagcgttgcgctaccagcgccatagccacaatcaacccacgctacccgcttgagatctcgcactatcagcgcgagatgttcgaactagcagccctcatttgcataaattggcgcgactcgtgccaagtgtggcgccatcagcgccatagatatggctaagtcacgctgtttacgtgacatccgcgcgaactgcgcgagctgctgaaccctgagcctcaattctgcattaaatcacactattagcttgaatatggcgctattcgcgtggataaggcgccttaaaaagttgaaaaatggggccacagcgttaaccgcatgagatgtcgcgcgagtcgcgcgaaatggacgcaaagacaatccttccagtgcttcatggcgcgatccgtgccgcttgccgcacgatccgcgctagattgcggaatcagtttttattttaaactccctcattcgcgccctcactccctcacctccccaaatctgctcccccattttcgcctgaaatccagccaccaccattaccctcaattcctcatcattccctctcttaaagccagacctcttccctcacataacccccatatcccaatcttctgctcttaacctctctctctctcgcactcttattctttctctcgttaatagcttcacttgacccagtaggcaccaagcttgaatttgatacaatggcaggagacaaggtaaaactcttttgattttcactatgtatgggtatgaacaacccattaggaatcaaatatctttgcttagggtcattcacattcagtttttggaaaacttagggtaggacattatgagctttatctactgctaaatccttttgtgattgttctgtaatgttaaggggcaacataatgcttatgctcatggcttctttgatccttgaatttcatatacttggcaaagtaataatggtattggtactcacaatatgctttgtgtgtgtgtgagttctgtttggggcatgctaatatgagacgtaaaataaattgattatgtgcccactacatgcttgattaaatgactaaatggagatttaagaacacaactagaacaatccatgtataaagcatgtgcttgttgatgatttggatgatataacttggttaagacatggacacattacttgacattgattgtaaagcaacattggtgcctccagaacattttgaatcaaaagaatggggactgtgattgcattgttctgatgatctacaaaaccacattgactgatgagaaatgaattgcaatgaacacatttaactcataccttgtgattgcattgttctgatgatctacaaaaccacattgactgatgagaaatgaattgcaatgaacacatttaactcataccttgatttatatctctgttttgataattggacttgaatggtttgaaatgtgtccatgtcaaacttaggacccagtaaattagaccatggacaagaccaaaatctgggaatggtcaggaacatgatagaatcctaattgtaatgaaaggtatgatggatgttctgaatttgaaacaagggaggcaatgtagttacttggtggttgtttgatttcataattttagaataaccttgattgacataaaccatattgcgatggtataacaattttaatgaactgatggtgattggataatacagctggttactagttgcttgaattaattggtttttcaaataagatcttgatataacccctgaacctgtaattgagaatcattgagggttgtcagatgaagtgaatagaactattttaattcttgtgcatactttgtctgaaatattgaacttgcaggaaacttgaatgcataagatgcacaggacctaatgttaaatatatgcatattaggaaccctcaatgggctaaatctgggaatccagatgaagctatttatttccttgtcagaaggtgcatattgtttcctaatcactgataaattgaattggtacttgcatgcaatgattgaattttgttttgtcgagtatagtcatgagtaaatctgggaattgttgagtcccatctgatgattggaaataagcttattgacccaaatgttgattgaactaagcttgataatattacaattgtcgctgaatatttgttggtgttgaacataaatgccaattgttctgttactaattttgggctgaatctgggaattcaaattgacaatatatgtttacaagctgattgttctccgatacctatgtctgattgtaatattgaatttcctgagctccaatgcatcaaagaattatgtgaaccaactacactttgtgcctgaaattaaactgaactaattggttgtttaatctgaaccatggcaaagagcaaatctgggaattgaatcaattgaattatgcatctatatttggttttgttctgagttacagggaaaacaagtagctacggctaaaaagaagaacacaggagcaggtggtagcaagagggctcgaattgcggattatgatgagggtagattcagatcccctgagtgccaggagaagtttgacacctggtatctccagaagaaaatcattccagaaaagaagattaagtgggaagtcctaccagaggggaacccggttcgtgaggtcatactcagacgccagtggcagcaattagtcagttttccagagcccagttctagcatgattctgaaggaatttttggccaacgtcaaccccgaaacagtggcatgcagcagacttagttgggtgaggggtgtccaagtcccatttgacgagaagaccattgagaacttcttggacacctgctatgatccctttgatggatgtgagttccttgatctctacttccggatgcagcctaatgctttcacgaagctatacagggacgaggttcctcagctggcgaccaccatccgcagggccatcacaggcctttacacagcttggaagcccaaactagggcttgattatattccagaaaagatgcagaagcatgatttggtcggagacgcagctttctggcaccagttcatcaaccacacaatcattccttctacaaatatgactaatgtgaatgtggagagggcgatcctgctatatactctttgaggtgaaggtaacctccacatttctaaccttctgtctaaccgcattctttatatgatacaggacgccagcagcaagtcttggctggcacattcctctctgattctgcacctgtgtcgccatgcgggtgtggaaattgcagatgacgagcccatggacgtcccgatctccccacttatgatccacaagacctatttggacgccatggagacagtgcctgatgagcaggttctccgagcttcaaagctcaaacctgaggagcttgtagcccgcaccccagagacataccagcaccagaggttccctagccagcagagattccaccaccaccatcaccagcaccaccagcttcagctccttcttccaccactcctggacatgagccgctctacacagattctcccacttatttggccttccaggagtttgtcaggactcagcttgcccagcagactagcatgcttggagccatttgcagacacttgggcattccaccctccgagtactagattccagtcccaccaccagtagcaccagcttcagactctcctatacccttagatgctgcagctacagagccatccactcaagagcctacatccacagatgctacagcgattgtagagagtagagagggagaggagtgaacatgattatttatttatttttctgtgtttctggtttttatgatttattttggattagacattacatacattctgcacttttacattctgcacatttatatagttgatacagtttctaattcatattttgcaaataaaagctgtttagatcaatgtttcgagttgaatgtgattttccaaataatgctgaaaatttttccaaaagcactgtgaccttatttgttgttgctggggacagcaacatataaatctaggaacggtcatgtatacgcattatttcgcaaatcacagtcaaggaacaaatgacgtctaacagaaacagaatttttcaaaaattttcaaaaataagcagcacatcagattttttagaatgaaaagtgaatggatacagtgatggataggatttctctggtgaaagcttgatgaaatgaaacatagcatgaactgcatgatacatgaatggaattatgattgttggtatgtgaaatgcatgttgaagttgaaatgatgctggaaataaagtcaactgagattgacttgagtttgaacacctgtgaggatttgagccaaacaacggtaatgtttcttttcgagaggctccaattttatggtactctagaacttgaattgtttctctggatgcaggtgtgacttgatatgattaaggcagatttttcttctgaaactagagccaaaatgactcaccttcaattatttttccatttgtacctcatttgagcctaagcttttcgtttcaaattacccaaatcagagccacatccgtttgacctacctccctgaggctagaagaggtttgatataagtccatgacagcagaagaacagggaattgtccatcaaggtatgaaagaacacaagtgaatccaattggttgtgaagaacaggaataaacaagcatagtccaagttggaaaacaataagtccattagctggaaatttgagaagctgtagtaattgttcaattttgtttatgtttactttaattataatataaaaaaaatccaaaatcaaaaagaagtttattgttttgtttttatttagaataaaagtgttgaataaagtaccaggttttgaaaaggaagacaagaaacatgaatgaccacaagaattggacttagggactggatctagcctcttgaaagctacttatccaaagaatttcctacccttaacccagccacgttacaagccggaaagaccttttgatcaagtcgtgcttgcaactgttgagaatattttcaagcttatggtggtgctgtgacattgttgagtaagagagcaatcatagcttgatacacttgagtgaatgagtggattaaacacaacttttgtgaggaatactcaagtactcttatgaattgacagcattgaaagtgccatggaaagctttgatgtgaatttgatcatacacaacatgatgattctaggattgtagtttgtggtttagtttgatcattgattcttgcttattcttgaattctttctgttgctggggacaacaactttcaaatctgggaattgtttgatgtgttgcaaacacatcttagttttaggctagttttaggttataatttagttaaataagtaagaaaatagattagaattagttaagtttattattttatttgttttaaactcaattcaatacaattgtgcatttcaggcccaaaaagaggagaatcaagcaaagaaagaagaaaactgagttcaaagtctcgcgcggatcgcgccagaacccgcgcaaatcgcgccagaagataaattgaaggctccagtttcgaagactccacgctatcagcgtggagtatcacgctattagcgtgagttggccgcaagaaccgcgtggatcacgccaaagccgcgccatcagcgccagggacacgagttcaagccattcaactcgaagaagccacgtgggtagcgtcatactcgcgctatcagcacgaaaagcccagcagcaggccttcagctcgaagactccacgcggttcgcgtggaggtccacgcgatcagcactatgcattcgaaagaatcgcgcggatagtgcaggacgccccgcgaatcgtgccataaagatcctgtttccttaattaatttatctgtttcgggatttggcacaaaaaaaggctttattactttaattaaatcattctataaaagaaggcttctggggattgaattagacacacttaataccatctatcatctatagacacatctacaaatcatattccatcattctaaacctctggaattcaagaatcaaggctagggtttcagcagaatcatgaagtattcaacagcttttgtattcttgaggcctatgttgggctaaactttgtattgtgggaagaccatgaactgatgtgaactcctctgtaacttaactggtattgaatgagaatttcttgatttttttattttactctgttcttcactgttttattcttatttggaattggccattctatttaggtatttagagttaggattcgcaatggggacgttggggttctaatttctgaccttagtaaaataacaattattcattacctagggatagggatgcgtggctgcagaacttataatatggtcttttaaatgcttaacttgatagacttcactaaggaattaagttttcgattcaggttagagggttaattcactaagggattagggattaactagagtaggaaagatttattctctgagcaatcagaaataggcaaaccgttgatgtagtcttttatatgcttgataggaattgctaaggaattagggttcttgttaaagggttaaattgctaaggaattaggatttactaaaataggaaagatatatcatttgagtaagcaaacttgataaacccgttaagtgaaagaggtaggaatcaaaggggattgtgcctgaccacaattgtttcttccattggtaatacttcgaattgtttactgcattatttcctttacattctttttttactttcaaaacattcaacacacaacaattcttcacaaataatttcatttttacttccaatcacttagattgaatcttactgtgaatttcacaccaatccctgtggagaacgatactctacttactcactttattacttgaaacgagcggtgcacttgccgtgttcgcaacaacttctttgtttaaaagattgctacgtggtttagcaatttttgaaaaatcttttataaatcgtcggtaaaatcctgcatgtcccaagaagcttcgaacggttttgacgttgcttggtggaggtaatttctcaatgacatctactttagctctgtccacctcaatgcctttcatggaaatcttgtgacctaacacaatgccttctgtcaccataaagtgacacttttcccaatttagcacaaggttagattcaatgcaatgttttaaaacaacatcaaggttagacaagcaggaatcaaaagaagtaacaaaaacagagaaatcatccatgaatatttcaatacttttttcgactaaatcagaaaaaatagagaacatgcaccgttggaaagtggcaggagcattgcataaaccaaagggcatcttcctatatgcaaaaataccaaaagggcatgtgaatgctattttctcttggtcttgtggatcaacacagatttggttatatccagagtaaccatcaagaaaacaataatatttcttacctgctagcctctctagaatttggtccatgaaaggcaacggaaaatgatccttctgggtggcgttgttgagcttcctataatcaatgcacattctccaaccagtgacagtgcgtgttggaatcagctcatttttatcattctttattactgtcataccgccctttttaggcaccacttgaatggggctcacccattaactatctgatataaagtatatcattcctgcttctagcagttttactacctcttttcttactacctccttcatggttggattcagacgtctttgtggttgtgcaacaggtttaaagtctttttccattaaaattttatgcatgtagtatgaggactgatacctgttaaatctgacaaggtccaaccaatagccttactgttttgttgtaagacgtccaccaatttcttttcttcatcctcagaaagatttgcattgatgattactggtttttgagaatttcctgcaagaaaaacatattttaaatgtgaaggaagtaccgtaagttccagctttggttcttcttccttcttttctttttttagttcttcaaagaggttttgatgaacaggtacttctttgcatgaatttaattgatgaagatattttgaggtgtcgtcatctccatcttcttcttgagtttcagtcaatgctttctctaagccatctttcttgtgaaggaattttctagagtcagcaataacttcatcgaggacatccactctaaagcattctttcttatctatagggtacttgatggcttcaagaacattaaactgaacttcatcatcatgaactctgacagtgagctttccctcatcaacatcaatcagcaccttggcagtcttcataaagggtctacctagaattaatggtacttcactgtcttcatccatatccatgactacaaagtcaacagggaagaagaatttgtcaactttcaccaacacatcttcaatgacgccataaggatgcttaatagatctatcagcttaattacaactgctcctatcctcttaaccatgataatggtatgaggttgatgctggcacctaagtcaagaagagatcttcccacagataaattaccaatagtaacaggaattgtaaagctacctggatctctagacttttttgggagagtcttttggatgatggcactgcatcctgcatccagctctatggtctcctcatcggtatatcttcttttcttggtaaggagatccttcataaacttggtgtatgttggcttttgctccaatgcctcaaaaaaagggatatttatttgtaactgcttgaagatgtcaaggaaacatttgtattccctttcctttaacttcttggatggagcgtgtggatatggcatgtgttggactggtggcggggtgataagtgccacatttcagctactttcatgtttaaaagctggcacttatcttttgatttacttcacttatcttagaaatttccctaaaatctagttaagaagcacctagtacttgtatttaaagagttccggaaaattgattcaatcatgcgttgtatttgaataggttcggtggaattctaaagcttccgaagaatcaaagcaagaaagaaaggtgcatatatcaaacataaggagttccaaaagcattcaaggcccaaaaatcacaaaagcccaaaggattcttcagcattaaggcttaagctcgcccaggccactgctccatgcctattttggtcgcccaggccacttcaagtcccaagaaactgccataagctcgcccaggcgagtggacttaggcaaatttaggcgcctgggcgagtgaagcacacaagaggtagaaaactatataaagggcacgaccagaagaggagaagcatccattcttcacttcttttctctcctagggcactagttgctcttgcttgcttgttttctttagtttaagtgagtgtaggaccttagggaggtgaggttgtgtgaattttgtaaggagattctgccgaaaagagagggtcaattataacgcctctctttaatcactcgtgcttgattgattttatataaaattccgtgtccactttgtcttaaaatcaaattagttataaactttttcacgaaattcttttcactttgctttccaagtttacgagttgtctgtaatataaacgattttcctcaccacggaccatgcaaataaaatttcttaacacatattagattattaatagtccaagtacagtccggacattatttgcacaatcccaacggtcaaaagttagatatatgagttaggaagatttctttaaaatttgaggaagatccaacggttaaagaatctacaatgataattttactaaaataggttttcgggttaaattcataatcactccattacacgcaattcaaacaacctccccataacttgacatcttcacatactctatacacctagggatgggaacagaaattttcttcttcttctttttttttttttttatatcatttgatgcttaagaaagccttattccacttatggctttctgtcacaattttttttcaatagtccgtcatctaagagtattatttattttcatcatcataaaaatatctattcaaaatatctaagggtgtttttgtcctttccaaaatattcaagggcatttatgtacatttccaatctaaaatatcttttctaaaatatctaagggcagtttggtcatttccaaaatatccaggggcgttttcgtcatttcgtcctcaaaggcatttttgtcatttctgaaattgtctaagaacattttggtaatttttcctagtaaatatcttactaaaatatctagggatacattcgtcatttccagaattgtgcaggacaaatttgtcattttcgccctagggatatagacgtcatttctgaaattgttcaagggcattcttgtcattttgtcctaaatttttctactgcatttccttaacatttcactcttagtaattgtctgtaattccctaaattttggggtgttacatcaatgatgagcttcgtcggtgattctcttgaggaggttctgcctatgtttgcctaagcttctctaaggattaggtgtactcttcttatccctatgctcttttaatcatttatgcatcattctatttcttgttggtaatttaattctacgcttaaagcttgattctacttgatcactagagtcacaaacttaaattcctaagtgagactggaaagtaatcttagggtttgaactgaattaaattactcgttacgttacgttactaggaacagagcataatgtttcgattgcattaaacacgtgaatatgatcttaatgcttgggtatttaattaagtatgcgaggaatcgatatttagtaaaatatccatagggcttaattgcgaggaatcgagttaagtttacctaaacgtgtgcgtcaacaagaatagaaaatgcataggtaaaatcaattaaagggataagcaagacgaaacctaatcctacattcccttgacttgtatccgtttatttatttcagttcccgtaaacgttgattgttttttgtttttctttattttacaatttccgcaacaaacaacaaaatgaatcttcgtcttttatctgtatataactactaaactgttaattttaaatcaaccaacgtaaacccaaatccctgtggagacgatctttataaatttgaaacttacaatgatacaacggtacgcttgccgtggtgtaaaattcctaacacggggttaaggcttctttgcctttgtcacttcttttctttttatcctcacttgtcacttttctctcaattttttcattagtttcttcctcatctttttctttttcacattcattttctttttccacttcatcatttttctctacatttccttcatttttcttttcttcctcattcctacccactacagttcctcttctagtaataattgctttacgctgctctttgggattgatttgggtatttgctgagaaagatccacctccattttcagctaactgcttggcaagctgccccacttgtacttctaaattcttgatagaagcttcggtgttcttttgattggtgatggacatttgcataaattgtgtaaggttgtcttccatctttgtcaatctgttggactaagcttgctgtggtggatttctatttgaaggacctgaaaaagaattagatgaactagcaaaggaattgttaggaggacctgcaaaaggagggttagtaggaacataagcattattattttgtctccaattgtaaggttgattaaaacctagaccactgctatatccttggtaattcccttgataatttggttgaggtcttgcttgattttgcatgtaatgtgcttcctcatcttgtgaacaatcaccaggtgttgtgcaatggccattctgatggtctcctccacaaaaatcacatctcagaatttgaacttgatgggctgaatgagatttctgtgagcttccttgctgaagttgaggaatttggcctatttgttttgttaaggcctctaattgctgggtcaagagcttgttttgagccaagatggcactttgagtgtcaagctctagtacacctttcctctgaatgggtgacctatcatggtgggattgatagtcacttgctgctatggaatcaatgatcactatggcttcctcggggcttttagatatcatggttcccccagctgaagcgtcaaggatcatcttggtttggggccttagaccattgtagaagatatgtaactgcgcggcatcatcaaaattgtggttcgggcatctcccatgtctcacataatggttcatccacaccttgagagaaagtggcaatagcggactttgcactgatgaatcttgaaggaggaaagaatctggcgatgaatttctcctccaaatcatcccatgtccttatacttttatttggttgtgattgaagccatgttttcgctttacgtgtcaaagaaaaaggaaaagctctaaggtaaacaacttcagcgtcttcatccgatgctcccattgtactgcatagctctatgaaagtagataaatacgtgtaaggatcttcatggtctagcccagcaaatggatgtgagccaatgagactgagtaatgttggcttcagttccacaaccttattgttgaaaggagggatgactatgttgttatagtgtttgggaccttgttgataagcatagtctccaagagtcctccttactagtctatcttcttctccgccacgattagccatgttgtcttttatctctggtgaaggagggttaatagacgaagttccttcagaatgcttgtcagattcttgtttctttttctttctgattttcctttcggttttgagatttctggatcaaaatgaggtttatctgcagacttatctagcataaagtgaaagaaaagaaactacaagatttctgttaagcaccgaggtttttaaaatagcaaggaaatgtatatatacaaacagaaaataaagaataagaaaatactaaactggaatttaaacaactaaactggcaagcgcaccattttatcgttgcaagtttacaaattagtaaaagttcgtcttcacagggatttgagtttacatcggttggtttaaattgttaccagtttagtagtctatatacagatgataaaaaatggagattcatatgttggtttcgtgcgtaaagtaaaagtaaaagttgcggaaaataaacgattactgaaaataaatgaatacaagtcaaggaagtgtaggattggatttcgtcttgcttatcccttttaattgattttacctatgcatgttctattcttgttgaggtacacgtttatgtaaacttaattcgattccttgataaacatgttgtcgacacgcaccaaaacaatttaactaagctaattttgtagcacagagataacctaggtcgactcagagacacaatcaatatggttctagcttcaattcaatggtaacagtaaggggggaattttatcaaacagtttgtgtgcataagtaaaatttgcaaaaacgtaaactaaaattaaagaacaacacataaactaatagaattcaaaagaagtaatgtaaaacagaatttaaaacatcaatccaattcacctcaccaagcaattcgaatcatcattgttctcagaaattaatcctatcaagaaagttcattcaatctcattagaagcaactcaatcgacttaacccctaaattgattgaaaccacaaccctaactgaaatatcatccaattattctgtgattaatattcgaaattaggcatgaatccataacctaattcgctttcaatcctaaacgcattcataatcatgaaaaatagaatagcaattgaagaagaagataaaaattcaagtagaattcgaaatactaaaccagaactccaattctccttgtgcttaggttggttccttggattgattgaggatttagccttccatgatcatcatcagtgaaagccctatgaaatggttgcacgaaaatggaagaatagaaaaacgaaaatgaagaacaaggaagaacagtagagagaaaatgagagcaagggttttgatcctaaaaacctaaaagagagaaatgtaaaactgttttattaaaatgaaaagagtggtctccaagtttcactcaagtcactaatatatgtagtgactaagttctgaaaataaaatggtccacaaacaagcccaacaatctaattatttgctatttacaaccatataagtcaaattcgcagcccaaaattataagtgcagaggcactaacttcaaagcttaaaatgaccctctaaatgatagaattggccttgggatatttctagcaaacttgtagatcctttcgttatctttccagggacacttagaatgctccattcggagatcggtagcaccctataggtcctacacaagtcagatacgtcaagtgagccaaaaatccgaaaatacgcaacaattagcaattaagcccacttacttgcctaggccaaagaaagggtatgaacaaggcacacatatttttcaatggatcataacaatgtacaaaagtgaaagagatgaaagatggaagaataatgttgaggtaacaaacaatccacgaaaacatgattacgaagtgcaaagtgaaaaagtagtcaagtttagaatcaagaatgcaccaaggtgatagaattctctcaaagggtgacactcaacctcacatgatgtgtatggcttgtatttacactcaaacaccacatgcaactagcacatccaagcattgacaaacctctcattcattcaacttgaaatacacatgcatcaaaagatcaaaaggactttattagcttgtattgaatggcttagggaaaggtggataagaaaaggatatttaggctaaagcttaagagaaaaaaagggacaatggggagcaagccaacaagataaaagaagggtagaagcaaggtgaaatttaaaagaatttacaaggatgaaaatgaaatataacaacttttattgcatatttttttttctttgcttgaacttctttttctttgcttatacacaattttttttctacttttcttctttttcttcttttctttgaacttttgctatttgaactctttcttttctctttttcttttcttttctttcaaaacaaaacaaaagacaaacaccccacacttgtttgaaacccactcccaaaacaattccaaagccccttttctccctaaagctagggtaacatggttttccatcattttttagtttttaatgagctaaagaagaaaaaaaaggctaaaggctcaaagagggtgacaatggatatcaacacaaggataggcttatttggctagtggctaacaaaaagaaggcctaaatcatttcaatcaaagcatgtgcaacaaggaatgtcaaaagaggcaaggcaaaacatagagtaatctagcacaagggtgaaatcacacatgaaagaacatattcacaacggctcaaaaactcacaaggtataattctaccacacatggttcatcttaaattctatttctcaagcctacttatcacttaaacaattgcaacaatgattcacatcaagtatgaaacctctcaatccaaccaactttttaacatttctcacaatttatgcaaattagaaatcctatgaaaaacatgaaaaagtgcctaaattcaataaaaaacagcaacaaacagaaacaacagaaacagacaataaaaacatacagactcaaaaactaaaacagacaaacagaatatatatagacagataaacagaaaacagaaaataacagacatcgacaaacagactgcaacaaaacataaacaatcagaaaacagaaaacagaaaacaaccagaatttcaaaaattttaaggatccttcacccccacttgaaatgcacattgtcctcaatgtgagcatgcaaagaaatgcaaacaaagagacaacaaataaaaggagggaaaaggaaactcccaaaatgtcgttcaaggcacatcccaaacataattttcttgatgcatgcagatgggaggatcaattccaagaagatcagcaagtgtccatccaggggccttttgttgattcaagtgaagtcaagtatcaagaatgaagatcaagcttcaaaggttttggacattcaaacatgcacaaatggagatgctcaaagggaagcttaaagaatcaatttaatcatatgtaaaaggaagtatatgatctgataatccatgtgtgtgtgtgtgagtcatgcatcattcattcatttaagatcattggattaaataattaagtaaaagaaattgatttaaaaggcacttagaaaaataagtttttggaaaaattaagtaacaaataaataatcgactacaaaaagtagaacatcgattattttgttcttcgtgctctttagaaaacaaagtatgatcattgtaatcgattacatattgttttaatcgattactcaggatttttatgaaaagtggtgctttcggtcttaatcgattacataagagtttaatcgattacttgcttgaacatacatctcaagaaaatgcatgatgattatcttaatcgattacttcatggaataatcgattatattgttctttgactaaatctagaaaagctcataaacattttaatcgattacagtttgtcattaatcgattactttgtataacttgaaaaaacatgtgcctcgggcttaatcgattacgtatcggaataatcgattaaataactcgttcttggaactctgaacgtttcataagctttttaatcgattactatcttgatttaatcgattacaaatgataaataatcgattactatagcgtacttaatcgattatcttcagttaattgacagttataaatagaattctgctactgaaataaaatagaagagctgagaattcgtgtgcgattaaaagattattgttgtaaacattcacaaacattctggatattcatctgtgataaagaaacacgtaggaacttcattagattcatgtgggtatattgatcatgagctgaagttttcttcttgcaatcaagttacaagaaaagctgcatatctgtggtgataatctgcatactcatctgttaatcattcatattcattcaacaatggattatcaggtgatatcttttcttggcttttgattgtgtaaacaatttctttgtaaattggtaaaagtatttctgttgtaattagtttcttgcaaacaaagagatagggtttctctaggattcacctgggtagggttctcagggtgaagggtttatctctaagaatctaatagtgttttagatttctgaatttcttctagggttgaaggaaagagacttgtaatattgcttgtaaagattttattgcaatagtggaactcctctctagtgttgagttggagaactggatgtagcctcatagtgtttgaggtgaaccagtataaaaatctgtgtgttctctctattcttccaattcaatttcgtattactttgtttgtgaatcaatatcattgcttagatttgtaatactctgttttctgatgctcataaaagggaagattgattgaaaactgattttgatattgagatttgttttgtctttgaaaattggtttaaatgtgataaagatcctgtggtttataactctgatgtaaaattttaattggacaagttttcaaccaattcacccccctcttggttgtttgaagtgttcctttgtttttcacctttttgtggcctctcaaaacatgcatcaaattctcttcaagctccattgacagactattagatatgatgactggaagcttctgagcatcatctaaatatgcatacttgaggtgctcaggtagtgatttcagctccaaggaaggtggctgaatagtggaaggtaaggaaagagtagaggctgagggaaatgggatagtatgctcagatcctgtatttgtacctgcaacacaatcagagtgaagtgcagaggaaatctccgcacaaatactacacacaacagcagaatcatcacaggaacaattacaagaactaaaatcaaagttagcaaattcagaagaaaaatcagaaagtaaatcagaaatatctacactatctactgcaacatcaatgatatcaaaaagaaaaacagaatgctcctctataggatctgatttagcaccaataacagtggaatctggaagttccttgccactcctcaaggtaatggcattcacattctctagattaatcactggttgtacatgaatgttgctgtaaggaccctcactacggcatgggtggcgccagatccagcgctgatagcgccgggatccttcagcagaaaaccctgtacagggtgtggcattgatggtgccatggctggcgccagactcactggttgtggcgctgatggcgcggggttggtgctaacggcgccacaatgtcggtgcagctggcgcgggtagcgtcggaggtggcgtggatcgcgccagacctctggcagacctagtatataaagggggtcacatttttcagaggagaaaaaccgtctccttcttccccagtgccccaaacctccatgggagagcttgccaagcttccatgaccctgtttcttaaccccaaacacttccttaaccctttatttaccctagaaactgtaaggaccctcattcttggagcctaaccccgcgctgtcgcgcggggattcacatgagaaaaccctgttaagggtgccgcgcggatggcgccagggctggcgctaatcgcgccagacccactggaagctgacgctgggagcgtcaaggtggcgccaagggcgccgaggtttccagccggcgcgggtcgcgcgattagcgctggaagtggcctggaacatccattttctttggatttccacgcggccagcgccaaggttggcgcggatagcgccatttgttttagaattggtgtgggtagtgccctagaaaatcaattttctctggaatttcacgcggatggcgctagacgtggcgcgggtggcgccacaggtctcgggaagttggcgctgatggcgcggggttgaatctgttagtgccggatcaccgactttgtggcgcggatcgcgcgggagctcgggcagactgactatttaaagggcaaacgcgttttggaagggaaaacactagtccctcttcttctccacgacccatcctccattagagcttgttccaagctttctaggaccttgttttgtgtcctaaacctcttcctgagacctataatcttgtttgaaccgattagaaagctgaaatcctgcatttgtgttcttgaaaacccagttgagtgagagttggaattctctagagaaaacctcagagaacttgagaataggcgagacctaaggcgggagacggacattagagcttgaaaaagctgttctgaggtctccttggtcgctactgaggtaaggaattcaagttctcttggatctctgtgaatttgggattttctgagttttgcgacccacactgagatggggctagaattagcccagggtcctgttaagagatgtgttcagagcgatgaatagatgaaggaatagctttcagtttttgattctgatgactttgaattttggctctgtgttacctatgtggcctgtgttatggtcacttgtattggtcatctgatatgctagagccttgtataggttgtgtcaacctgagaggttaatgggatggggccttggttgaaactgaggccattccgataatatttgagcatgagactgcattgagtctgtgaggactcaattgattgataggcagtcatgtggaccttgtgtggtctgagagaagcctaatgatgggctagacttgatttgaaccctaggatagggaaattctgatatgcttgatctgtgattgatgtctgtggtcttgatattgatatgaaactgtatgtgccttgaataggcgttgattctaagattattggtggcgggagccacatagcagggaccagaccacagagtgatattgttccaggtaagttcagtgtccctggggatgattcccatcttgtgtgccacaccacactccagggggagttgtggtcatttcataatgcatgcatggatatctgcattcttgtgatgatttatatatgcctctgagcttgaattgtgctgtgctgtgatatgattgtgtttgagatagatctattggccaatagatagatatggacctccctaggagatggcgattcctcctagtatggctggctcttgggtgatgatgatcccggggtgatgatgatcccctaggccaagggaataggagacggctattccttctattctcggaggtaccatatattgtgcatccatgcaaaggggtagcacccaatgggatgacacaggtgtgagttccggcctcacactgggagacggctattcctcccattataggagacggcaattcctcctattctgtgatattgatacaggagatggcaattcctcctgtctagaggtacatatatgggagatggcaattcctcctattccgtggctttattataggagatggctattcctcctactctgatatgttagccacttttgtatgatatgttgtgttgttgtgaaaagccagagggctagtatgttgtataaccacagatgtggtctagtatctgttatgtatatgtacagaccctgttgttgtatgtatagaatgaggttcctcctgattgtcttattttagttttgtatatctgcctatgtggatgttgttattttatgttacatctggatcaacaggagcttgttttatatgtgttatgatgtggttttatattccatgcataatgaaatcaagaaattcgattctatcgcttccgcaccgcttttatataacgctgatagcgcgattatgatattattgatgataacacgtctggggtgttacagttgctagaactttgctgctgcatctggttgacagttgtagctaacaatccaatctgagtctggaggtcttggatgttagcactgacattctattgaaattgaaggttggtggtagccatctgcttcatcaagtcctctaaagaaggtccaaaaatggcttgcacaggttgtgcaggtgtaggtgcagcttgctggaactgtggctgttgtttgaatggggaaggttggtatttggtggtggcaggctggaagggttgttgtggaggtctaaaaggctgttgttgttgtgggccaggaccatacctcaaatttggatgatctctccatccaggattataagtgttggagtaaggattatactgttgttgaggtctgaatgactggccaggttgcatggcagaaacttcagcaggttgttctgcctcttggagagtggggcatgcatctatgggatgatcaggggcacaacaaataccacagagccttggttgattggctgccatcacattctgttgttgcccaatagcaagctgcctcacaagggatgtcaactcagtcaatttgttctccaatctctagttatcagcaaccatagagacagaagcttcatttgcagccatcactttagatgttgtaattcttgcaccaaattgttgatagttggctgccatgttagaaatcaactgccttgcagcaagaggggtcttgtccatcagagcgcctccactagctgcatctatcatactcctatccatcaacatcaatccttcataaaagtactgaatcagtaattgctcactgatttgatggtgaggacaggtagcatacaacttgttgaatctctcccaatactcatacaaagactctccagggaattgccttatgccacaaatttcctttcggatggatgctgttctagaggcagggaagaatttctctaagaatcgtctcttcatgtctgtccaagtggtgataggatctggttgaaggtacaaccaatccttagcaacaccatccaaagagaaaggaaatgctttcatctcgacataatcctcacgaacatcatgcggtcgcatggtggaacacaacacatgaaactccttaaggtgtttatgtggatcttcaccagcaagtccatgaaacttaggaagcaaatggatcagtccagatttcagttcataactgacctcagtctcagggtattgaatacaccagggttggtaaacaacatcaggtgtagctaactccttaagagttaggttgttatcagccatgatatcaatgttgaatcagtaattgctcactgatttgatggtgatgacatgtagcacacagcttgttgaatctctcccaatactcatataaagactctccaggaaactgccttatgccacaaatttcctttcgaatggatgctattctagaggcagggaaaaaatttctccaaaaatcttctcttcatgtcagtccaagtgttgataggatctggttgaaggtataaccagtccttagcaacaccatccagagagaaagggaatgccttcatcttaacataatcctcatggacatcatgtgggcgcatggtggaacacaccacatgaaactccttaaggtgtttatgtggatcctcacaagtaagtccatgaaatttaggaagcaaatggatcaggccagatttcagctcataactgatttcagtctcagggtattgaatacaccagggttggtaaacaacattaagtgtagctaactccttaagagttaggttgttatcaaccatgatatcaagatgtgtagaagcagaaggagtagaagcagattcagaatcaaagtcagaagatactacactactgtctaaaactacactatcaaagtcatctaacctagggttatgtctgtttaatctgtgaaatgtcctatctatctctggatcaaatgaatataattcactagatgtggacctagtcatatacagtttagctcataaggaacaataaacacaaacaacacaaaaatatcagaccaactatatatgctgaaatgaaatagaaattggaaaactgccctaaaatttttttaaaaaatctaaaaaaaataaaagtgaatgcttaaaaatcatgattgatttttgtgatttttttggtgatttttaaaaataatgaaattagaaaattgcctaaaaaatggtctaaacaatggaatttggcgatttggacccctggtgaacgtgttacttcataataggttcaacttgatgtatgaattttctacaccttttggtaaaatttcagccaattccgagatagtttgctgtgaaattaccagaatgcccctactccaattgtaaaaactggtccaaaactcctacttagagttcgaatttgccaatttgaacccacaccaaacccctaaagggattgcttttgtttaaaataggggataaaccttgggaaacaaatcgcaactcaaactgcacaagctggaaaaattttgggacagcaaaatgacactacaaaaggaagtgtaggattgaatttcatcttgcttatcccttttaattgattttacctatgtatgttctattcttattgacgcacacgtttatgtaaacttaaattcgattccttgataaacacgttgtcgacacgcaccaaaataatttaactaagctaattctgtagcatagagataacctaggtcgactcagagacacgatcaatatggttctagcttcaattcaatggtaacagtaaggggggaattttatcaaacagtttgtgtgcataagtaaaatttgcaaaaacgtaaactaaaattaaagagcaacacagaaactaacagaattcaaaagaagtaatttaaaacatcaatccaattcacctcaccaagaaattcgaatcatcattgttctcagaaataaatcctatcatgaaagttcattcaatctcattagaagcaactcaatcgacttaacccctaaattgattgaaaccacaaccctaactgaaatatcattcaattattttgtgattaatattcgaaattaggcatgaatccataacctaatccgatttcaatcctaaacgcattcataatcatgaaaaacagaatagcaattgaagaagaagatgaacattcaagtagaattcaaaatactaaaccagaactccaattctccttgtgcttaggttggttccttggattgattgaggatttagccttccatgatcatcatcaatgaaagccccatgaaatggttgcacaaaaattgaagaaaaaaaaacgaaaatgaagaacaaggaagaacagtagagagaaaatgagagcaagggttttgatcctaaaaacctaaaagagagaagtgtaaaactgttttattaaaatgaaaagagtggtctccaagtttcactaaagtcactaatatatgtagtgactgagttctgaaaataaaatgggccacaaacaagcccaacaatctaattattttctatttacaaccatgtaagtcaaattcccagcccaaaattacaagtgcagaggcgctaactttgaagcttaaaatgaccctctaaatgacagaattggcctcaggctatttgtagtaaacttgtagatcttttcgttatctttccagggactcatagaatgctccattcaaagatcggtagcaccctataggtactgcacaagtcagatacgtcaagtgagccaaaattccgaaaatacgcaacaattagcaattaagcctacttacttgcctaggccaaaaactgaattagaataggaaaataaaggtccaagagaggtcaaataagcaaagaaggatagaaaaatactcaactaaaagcactctatcattcctcgcaattaagtcctaaggatattttgctaaatatcaatccctcgcatatttaattaaataccctagcattaagcttctaatcacgtgtttcgtgcgatcaaaacattaagccctattcctagcaacgtaacatagtgagtgatttaattcaattcaaaccctaaattaactttccagtcgcctttagggttaagttcatgaaactaatgattaattagaatcaagcgttaagcatagaataaaatcaccaataaggaatagaaccatgcataaataattaaaagagcatagggataagaagagtatgtccaatccttaggaaagcttaagagaacatcggcagaacctcctcgagagaaccactgactaagctcgtcatcgatcctcttttcggcataatctccttatacaattcgctctacctgacttccctaagttctacactcacataagaacaacaaacaacttaaatatgaacaaacaagtgattttgggagagaaaaacaatcaaaagcatgctttggccttcaaatttcgtccctatttatagattttggggtcctggatgctttggtagccctggccaccaatttcttcacaaaatgggcgcttgggcgagttaggatgctgccttggaacttgttgctcgcccaggcgagcaaaataggcataaactggtcgcctgggctagttagaatcttagtcttgaaggattctttgggccttgatgcttgttgggcctggaatgctgtttgggacttcattctttgcttagttcactcctagctcttggttttcgcagcttgattcttccataacctttaaacctagcaaaattaaacatttgattggacgaaatcctttcaaaatacaaaagcataacttagcttaatataaccatcaactaactaggtttctaggcttaacttgtgaataactcaattaaaataacagataagtgccatatttgaattctatttttactaaaatgtggcacttatcacccaaaggaggctgaatcccactattcttgatgtggtgaagaaggaagtgatgaagctactagctgcagggatcatctatctcatctctgatagcacttgggtttcacctgtccaagtggttcctaagaagtcgggtctcacagttgtgaagaatcaagataatgagctgattccgactagagtggccaatagttggcgagtttgcattgattacaggcgactcaaccaggccactcgcaaggaccatttccctctgcctttcattgatcaggttttagagaggttggcaggtaaatcacattattgctttcttaacggtttttctggttacatgcaaatccatattgcactagaggatcaacataagaccacattcacttgtccatttggcacatttgcctacacccggattccttttggcctatgcaacgcacctggcaccttccaaaggtgcatggtaagcatcttttctgatttgttagagagttgcatggaggtgtttatggatgatttcactatctatggttcctcttttgatgcatgtttggatagtctctctagagtgcttgaccgatgtattagtactaaccttgttcttaattttgagaaatgccatttcatggtgcataagggtatagtcctaggaaatttggtctctagtagaggtattgaggtcgataaggcaaaaattgatgtgattacctctttgccttaccccgtttctgtgcaggaagtacgttcctttcttggacatacaggtttttataggagattcattcaggatttcagtaagattgcattgccattgtccaagcttcttcaaaaggacgtagactttacatttgaccagccttgcaaagaggcatttgagggattgaggaggaagttgactacctctcccatcatgcaaccgccaaattgggagcttccctttaagctgatgtgtgatgcctctagttatgcacatggggctgtgttgtcccaaagagttggtaaactatcccatgtcattgcttatgcttcacgtcctttggatgcagcccaagttaactacaccaccactaagaaggagcttttggctattgtttttgctttagataaatttagatcttacttgctttgctcccatatcactgtctttactgaccatgcagctttgaaatacctgttgaagaagcctgatgctaaacctagattgatcaggagaatgcttcttcttcaggaatttgacattgagattaaggacagaagtggtgcagaaaacttggttgctgaccacttgagcaggattgagggacctctggagtcctttcccattcgtgataattttcctgatgagcatttgatgcatttgcattcctcgcatgtcacaccttggtttactgacattgttaatttccttgttgcatctgttgttccacctcatgcatctaggtcccaaatagctaaacttaagagtgatgctaaatattatgtttgggatgatccttatttgtggaggtttggtagtgaccaagtgatctgaaggtgtgtgcctgatcacgaaattcagtctattctttatttttgtcatggcacacctaccggaggtcattttggtcctcagaggaccgctaggagggtattcaactgtgggttcttttggtctaccttgtttagagatgctcatcactttaccaccacttgtgagcagtgtcagagagcaggaggcacaattacacatagatatgagatgcctcagcaacccattattttctgtgagatttttgatgtctagggtattgattttataggtccatttcctgtttctcatggcttttcatatattttgcttgttgattatgtttctagatgggttgaggctaaggccaccagaactaatgattctaaagttgttgtggattttgtgagatccaacattttttgcaggtttggtgtgcctaaagccattatcagtgaccaggggagccatttctgtaaccggtcattcgcatccttgcttcagaagtatggggttgtgcatagagttgctacagcttatcatccctaaactaataggcaagcagaggtttttaacagagagatcaaacaagtgttacagaaggtggtgcaaccaaacaggaaagattggagtaagcttcttgaggatgctttatgggctcataggatcgcttaccgcacacctttggggatgtctccttatagggtggttttcggtaaggcatgccaccttccagtggagattgagcaccgtgcttattgggctgtgaagagttgcaacatgacatttgatgaagcgagtatgaaaaggaagcttcagttgcaagagcctgaggagattcgtttggaagcctatgagaactccaagatttacaaggagaaagtgaagaaattacatgaatctaggaatcttagaaaggagttccatagtggccaaaaagtgttattgtttaattctcgccttaagcttatttccggtaaacttcgatctagataggattgaccttttgttattactaatatttttccccatggtgtagttgagattaaaaatgaagctaccggcaaagtcttcaaggtcaatggtcaccaactcaaagcatttcatgagagccctcaagtggaggaagagcttgtggaggacatctctttggtcctgccaattttatgtgaagatgtgtcttgaatgacatttggggagtttgcttttccattcttttatttgttgtctctttgttgcatttctttgcatgcttacattgaggacaatgtgcatttcaagtggggggggtgaaggatcctaaaattttttgaaaatttggttattttctgttttctgttttctgtctatttatgttttgttgctgtctgtttgtcagtgtccgttgttttctattttccgtttgtctgtctgtattctgtttgtctgtttcaatttttgagtctgtatgtttttgttgtctgtttctgctgtttctgttttgttgctgtttttattgaatttaggcactttttcatgtttttcataggatttccaacttgtataaattgtgagaaatgttaaaaagttggttggattgagaggttcatacttgatgtgaatcattgttacaattgttgaagtgataagtaggcttgagaaatagaatttaagatgaaccatgtgtggtagaattgtgccttgtgagtttttgagcctttgtggatatgctccttcatgtgtgatttcacccttgtgctagattactctatgtgttgccttgcctcttttgacattccttgttgcacatgctttgattgagatgatttaggccttctttcttttagccactagccaaataaacctatccttgtgttgatatccattgtcaccctctttgagcctctagccttttctttcttgtttagcccattaaaaacaaagaaaaaaatggaaaaccatgttatcctagctttggggaaaaaaggggctttggaattgttttgggagtgggtttcaaacaattgtagggtttttgtattttgttttgtttcgaaagaaaaaagaagaaaaagagaaaaagaaagagttcaaatagcaaaagttcaaagaaaaaaaaagaaagagaaaaaattgtgtataagcaaagaaaaagaaattcaagcaaaagaaaaaaaatatatgcaataaaagttgttatagttcactttcatccttgtaaattcttttaatttcatcttattgcttctacccttcttttatcttgttggcttgctccccattgcccatcttttctcttaagttttagcctaaatatccttttcttatccaccttttcctaagccattcattgcaagctaataaagtccttttgatcttttgcaggacctttagagtgctaccgatctccgaatgcagtgttctaggagtccctgaaagataatgaaaagatatacaagtttgctagaaatagctcaaggccaattctgtcgtttggagggtcattttaagcttcgaagttagcacatctgcacttgtaattttgggctgcgaatttgattttcatggttgtaaatagtaaataattagattgttgggtttgtttatggcccattccattttcagaacttagtcactatatgtattagtgacttagtgaaacttggacaacacactttacaattcaataaacaagttttacatttcttttctttagtttttaaaatcaaaagcatgttcttcattttctctcaagtgttcttcattgttcttcatcttcttcatttccattttgctattcttccatttttctgcactcaattcatggggctttccttggtgatcatcatggaaggctaaatcattaatcaatccaaggatctaactcaagcaagaaaagaattggagttccggtttggtatttcgaattctaattgaatattcaccttcttcttcaatttctattatgttttcatgattatgaatgcatttaggattgaaagtgaattaggattatggattcatgtcttaatttcaaatgataatcacaagattaattgaatgatatttcagttagggttgtggtttcaatcaatttaggagtagaatcgattgaactgcttctattgagattgaatgaatattcataatagaatcaatttatgggaatgatgatgattcaaatagcttgggttagtgaattggattgatgctttctaatctgttttactttactccttgataatcttgttaatttttgcattgttctttaattttagtttgtgttcttgcatgttttactttacgcataccaactgtttgacaaaatccccccttattattaccaatgatttgaagctagaaccatattgatcgtgtctctgaatcgacctaggttagctctgtgctacagaattagcttagtaaagtgtttttgatgcgtctcgacaaagcaatatcacccctgttatcttccccttttgatttcctttgaaagtgattgttccaccatgcatgggagtcagccattggaacatacatttttcgcctatcatgtgtcatgagcaaccactatcaaggtaccatgattgatgtgttcttgttgtggttgaatatatttgcaacatgaattattttctctttaggtacccaaattttcttgggtcctttctggttagttttgaaagcattggacgatccggtctttggtagatgtctacatttggatgtcatgtgccaatctttccacagaggtaacatattatggtttcttcatcatgaacatacttctttcatttatatccatttccaattttgttagttgggaatttgttgtatcttaatattttgttaagtttctcagtgcttcgaacatatttggatagattttctcttataaattcaatcttttgatgaagtgtaacaacatcatgagattatttttggagaacctcatactgttcaagtttatcatttgataatttcaatcttttcttgtatccttcacattcaacccataaattatgtttacttgcctccaagttttcataattcttattgacctatgaacattctttcaatagattacacctttcctcatttaggcaatcatgaagtttattgagtgtggtatactcattttgtaagccttccaattgatttttcaacttttgacagtcttctgatagacaagatctttctttacaaatttcatcattttcaagttgaagctttgttgtctttaaatttagactttcaaattcattacataattaagtggaaatttttgaagaattatatatcttttcttcatgttttctttgaagttgtttgtaatattttgaaagacttttgaagtcttttaagctttgtacataatggatgagttggatgttggatatagggggagcaacatgaagaatgaagcctatgacttagaagattgttttgagcttttcacatgccttgaagattgtaattctaatgaagcgtaggagaaggcaaccttttgacccttgcattgcattcacatactcattaacatgcttaaatgattttcataaaaacatcaaagctactcactaattgaaaaaggatttaattgaataatgtttttggaaaaatataattttactgttttaatcgattacataacagattaatcaattattcagttcatgtttaaaattggaaaaagcttttatgaacattttaatcgattacctatcggattaatcaattatttggctcgtatttaaaactagaaagctttggtgaatgttttaatcgattacacacttattacaatcaattacatagtgtaaaatgtattttgtgccttgctgtgataatcgattaccatcattcgtaatcgattacataggccatttgaaaaagcttgctttgttgctttaattgattttcattattcgtaatcgattacacaggctattttgtgaaactgaacttttctgatttaatcgattacagctcgatttaatcgattattttgttcgttgttgaaacccagaatgtgccttgaacactttaatcgattaagtgacagtttaataggttacatatgctttttaatcgattatttggcatgtgtaatcgattacaggttgttacaaaattctgttataaatagaaggaaggcttggcttgttttaaaaacttgaacactttgtattttctgagcatacacaagtcttctaagagtttgaaagtgattttctgggttctctaacttcttgtcccatttttaatcatcattagctattgaatgatatttgggcaagaaactttaagagtgaaatggagagcatgttctgaaattatgttttctgctattcaaccttgattggtaattcatatgcattcatattcattggatcatcaggttgtttctctccataatctttgattgtaattttgttttggaatttctgttatatgatgctattgtaagtgagttcttgaagctttggctagagtagtgttctctaggaaagaacggagtaatgttctctggttcttgctctttagaagtctaataggattttagatttctattctttatctagtgttaataaagggaggttgttgtaaagcttgtaagaacataaatttataatagtggaactctaatctagtgttgattagaagaaactggatgtagcttttgttgtgaagtgaaccaatataaattggttgtgttgattttctttatctctatctctacaagtcatcttgttcatttattcttggtttcattatcattacccaacaagttctgttttgagctattggtttcttgagctgagtaatttgattgagtaaaaacattcttgatttttaaagtgataaagatccttaactctgatttgataaataaattttaaaagaccaagtattaaccaattcacccccctcttggttattgtgggtattcccattattttcattggagagaagttcatgtatgctaattgaagagtttcaaggttgtttttatctacctctttatctaatttagagtctgatccttctgatgtagtgtctgccatcagacagaggttggcttcttcttcctcttctgtatcctcatcggatgacgtctcgtccagttcttgtaacaccccggacgtgttatcatcaataatatcataatcgcgctatcagcgttatataaaagcggtgcggaagcgatagaatcgattttcttgattacattatgcatggagtataaaagcacaacacaaagcataaacataacaagcttctgctgatccagataacacatacacaacaacataggcagacatacaaaaccaaactcagataaataggaggatacataatctcatacacattagcataacctgtacatatacatacaactcatagttttgaccacatctgtggttatacatcaacatatgtacagtacaacgggtgtacactcacaccctatccctatatagtcttcatctacagcccatgaccactccagcacactcagctagggcctcatgtccggtggtagctcctctcctctagaagcacctgaaaaccacaacccacaataggggtgagataaacatctcagtaaactcagggttttgggagatcctcccttaccctggttcacccccaagcacagacacataaacaaatcataacaaagcctaggacatcatcctggctatcacacattcccagctatctgggtactaactggatgctatcagcatcagaggtatcccacctcatactggctctcaagccatctcagactcgtctcacagaggtaacatacataggtgtcaaccactggacacttctcataccagagaggcaccgcctcatccactaaaacaagcattgcttgagtcatctactcaggacttaaagaatccagatatggctcatctaagaggccctaggctctcatcccctcgggaagccctctcttagagatacaacatatctgtctactgcctggcctctccaggactttcacaacacatgcctgagaaagactatccacacagggagctctcatccctcaggactttcagtcctctgcctgtgagagactatccaaactgggagctctcatcccacaggacttcccatcaactgtctgagagagactatcctcacagggagctctcatccctcaggactttcagtccgctgcctgtgagagactatccacactgggagctctaatcccacaggactttcagtcacattgcctgagagagacaatccacacagggagctctcatccctcaggacttccagaaactggcctgaggataaccactcaggactttcatcatcgctgcctaaggaggaacatccatacagggcaatccatccttaggactttaggcggagagcagtggcacctcccaaggagtatcagccattccaagggagtcctcaaactcttcctctggctagggaacctcatctagcccgatactattccagtatcctatagattccagcactgaccatctcatggtctttatctcataaagagtcacagaacattctcacagtgttctgtggaaaataagaaacactcacaattaaccaagagggggggtgaattggttaagtatagatattcaaaattttcttgttaaaaatcagagttaaaaatgaccttcggatctttgtcacaaaactaaatgaatatccttatccaagttcaatccaagatttgatatgcttaaattttaaacacacagaaaacagagttcaatcagaaacaataaagaatgcagtaattaaaacaagaagcaagatttatactggttcacctcaaaattagaggctacatccagtttcttctacttaacactagagtagagttctactattgcaaatatatttcttacaagatattgcaaacttctctttctcaaccctagagaaagttcactgatctaaaaccctattagacccttagaagctacaccaaaactgagaaacctactcagttatacatggagaaaccctatctcccttgcaagaaaaccaacttacaatataaccaacaaaaacagagttactgcagaaaaatgaaatacccacaaagatttaggatagaattcacctaatgatccaagatagaaatgaaaatgaatgaatgacctcaggttgaatgtaatctaaagatgcagaatcaattcctaagcctttgtgactgagtaagcttgcttcatgtaaggactttttttttttcggcgcggggattcaggttagaaagccggtgaaaggtgcttaaaaatgcaagttttatggctgttctggcagatggcgcgacccacttgaagggtggcgcgacacgcgccatatgtgttatacagggcagatggttctgccatgccacgcgagtcgcgtgaagatccacgcatgtcgcgtgggaagtggctaggaaacaggcttttcctctgtgaactcacgcgagtcacttgggaatccacgcgagtcgcgtgaaaggccagaaaagaatggcgcgagtcgcgtggaatagtggcgcgaggtgcgtgggatcgacggatctgtttttataaaaggccctttagggctgaagaagaaggagaagaagagagagaagagagagaaacctccattgatgacctcccaagcttttagggacgttatctactagtctaaacacttccctgagacttgctatcgtgtttgaaccgattgaaaagcttgaatccttcatcttctacctagaaaaccccaatttgagtgagaagaggaaccccagagggaaaagctccgagaactcaagcttggctcagacccacagcataattggaacgtagaagctagaggaagtcgttctgaggctgttgggttcgccactgaggtaagaaacgcaagtttcaccgtttaattttgattctgggggtccctgtgaatagtgacccatatgagctggggctagaattagcccagggtccagttgagaaagttgttcagggctttgaatagatgaaggattaactttcagtttttgattctgataactttgaatcttggctctgtatatgcctatgtgacttatgtagagtcacttgttgatggttctctgataggctagagccttgattgtgatgctctgagttaagaggctagtagagcagggctttgagaggatctcagcccctttctgataacaattgaattgtgaggctgagtaaagtttagattatgtatatgtgtggcgagtctagaatgactcagatggattgtgttccatcttgatggaccttgaatggtcttagagcagcctagtgtaggctgagttggtttgaaccctaggataggggatttctgtatatatgtatatatatattgtgaatttcatgtctgtggtctgattttgatgtgaaattgcatatgccttggttaggcattgattgtgagactattgttggcgggagccacaaacctgggaaggaattgctgactgagaccttaccaggtaagttcagtgtctctgggggatgaattcccatcttgtgtgccacaccacactccgggggagtggtggtcatttcatgatgcatgcattggtagttgcatcctcataatgatgtatgtatgcatatgtgcttgattttgtactgtgatatgattgtgatagatctgttggccaatagatagatatggacctccctaggagatggttttccttctagcatggctggctcttggttgaggtagctcccaggggattgattcccacaggccaggggattagaagttgaggtagctccttctattctcggaggtaccatatgttgtgcatccatgcgaagggttagcacccaatgggatggcacaggtgcgagttccggactcccactgatttaggcgttgaggtagctccgccaggcgttgaggcagctccgccatgtttgtatgctatgcttatgttgttatgagggccagtgggccaggccggtgggccgtttgcttgtgattgcctgatgtatgtgttatggaagtgggccagggtggaggagaagcctccatggaccctgagcttactgagatttgttatctcaccccgtgtgggggattatgcttttcaggtgactcttccggacgaagagagcagcctcagggcaggaggcccgagtagagactttcctgcttggctgatggcagcagatggagctgataggctcatttttggattgttttgattacattttgtaccctagagcagggatggagtgtgtgtactcctgatgattagtatagttctgtatacccctgcgagggatgatattcttttgtgtcacacgatgtggtgtgagtactgatgtataattgtacagaactagatatgttatgtatatgagacgagttctcctgaatataactgttgcatctttgatgaatctgcctaactctgttagttatctgtctgtatgggttatgctatgagaaactggatcagcaggggtatgccttatgtgattttgtgtgatttcatacataatgtatcaagaaaagcgattctgagcttccgctgagttttataaactatgttttaaacgttaaactgatattatgaatgataacacgtcggaggcctacggggtgttacacttcactaacaatcttagttacccatcaatgaatcattgaagcaagactcaagaacccagaagaaacttttgtgaactcttagatgcctttagagaatgctcagaaatcgtaaaaaatcaactcagtaatgatctcacttagttctttttccaaaaaggcaatgggttctatttatagttgaaatcgtaacagagttaatcgattaaatgcgctccccacgctcctgtaatcgattaaaatcattaatgcagaatcagattttcaactaatggttaagataatcgattaacccgatacgtaatcgattaaatctgtttgagcaaaaatactgattgtaaagtgtaatcgattacatccaattgtaatcgattaagtcagacatatgctaaaatcagttttataaagaataatcgattacatccagtggtaatcgactaatgcagtcctacacttaaatcatgtttgtgaagaataatcgattacatttaatggtaatcgattaaggcagagtgaccaagtttatccaatgagcatgtaatcgattacaacacaatggtaatcgattaaagcagtcacacgaccaatttttcaaatatgctgagttgtgtgtaatcgattaaccaataaggtaatcgattaaagtgtttatgcttggttttctagaaaccttaagaacaaaataatcaattaagattagccagtaatcgattattgcttctttatgttgttttcttagctttctcttaattttctaattaactgcttaactcttctatgatgcaatacttaaatgatacatgaatgctataatgacttggatcatcatgatgctttcaacccttttacattaaatcacaaacaatcatcttcaatgcttgatccatgttgaaagtcaaaactccaagacttgcaccttgattgaatctttacttgatcttcattcagttccccctcaactcaacaatctccccctttttggctttaaacatgccaaatttccaattgaaaagcaatgggtctttgtgattgaatgagaaggcttccagtatttttgtactttgcttatcacctgaaaaataaaaaattctttccaagaacaagtgttaaaggtatctgatctttaatcattattcattcctaatatatatgtatctttatcaagctttttcaagtcttaactcccccttaatttctcaatttatgcaactgaaaattcagttaaaaaatgacacgaaaaacagaggtgaacagagtatgatgcagagcatttgcattttcgtttgattttcaatttttctccccctatttggctttttaaagtcaaaaattgaatgcacagcggataattgataaacagaaggcataaatttcatttatagaggctaagaagtacatttgaatgcagaaatacaaagcagaaaagagagtacatgaaaacacgaattttattgatgtaaactgaaagttacaaatagaaagcagatcagacaaacactaaatctagatttattacatagagagcagatctggcaaaaaccaaatctagtgaatcctaattctagaaagcagatcagacaaaatctaatgaattctaagatatttgctgatactgtgtccttttatgctttccattaacaatatccggacactctctaatgactttcaagactccatataacatagccttgatatcctcttgaagctttagcatggtctcagccttaaggtcctgagaaggataattctccaggcttccaaggtttaaccataatgatttgaaaagaaaggaaaagactaagaaatggaagagagacttgatgcagattttccaaagacagacaatagctatttatagagaataaaggcagttcagtgatcaacttttcaaaagatgtaactgttgtgaacgaatttaaagcattggaagttgcatagattctgagtggtcaattttgatggcacataatgcattgattggacggttatagatttcaaaaaaatgtcagaaaacgcgtaacagcttgaataatcgattatattactgtgtaatcgattattccagaggagatataataatacctatacagtgtaatagcttactatatagttggtcagaggttgaagatgaaacgtaattgattgtaatgtaaatgtaatcgattatatggccattaatgtttttagaacttaggaatgaacaatttaatcgattaacttttatgataatcgattattccagcacgtcctagaatttcaatgatgaattagtaatgtcgtaatcgattattccgataggtaatcgattactccagagtggcatacattaaactttgtgaagcgtaattgatttcaaatcttgtgtaatcgattataatgacttgattttcaaacaggattttagttttatttgaaataatcgattatcccgatggtttaatcgattatgtcagcacgagaagtagaaaacaggttcttttatcattttgcacagcttgctagttttggatgcaaagtataacactaacactatggctttcaaagtatagaatcagagcatttgatgataatacagccttttatattagtgttggtaataataaaggcaaatcagcatacaaaattgcacatataccatatcatacttatgctagcatatgttatgttcatccaggattcctagcatgtttctaagagtgtaaaatctatccttaggcaaaggtttagtaaatatgttagcaagttgatgatgtgtatcaataaattctaccttgatgttacctttttgcacatgatctcttatgaaatgatgtctaatctctatgtgcttggttcttgaatgcatcacaggattctttgaaatattaatggcacttgtattatcacacaacaatgggatcttctttaactctactccataatcttgtaattgttgcttaagccaaatactttgcgcacagcaactacctgctgaaatatattcagcttctgcagttgataaagccacacaagcttgctttttgcagtgccaagaaatgagtgagcttccaagtagatgacaagttccactagtgcttttcctatcaagcttacatcctgcaaaatctgaatcaaaataaccaattttattaattgatgcatctttaggataccagagccccactttgggtgttgccttgagatatttgataatcctttttacagctgaaagatgagactcctttgggttagcttgaaatcttgcacacaagcaaacacttaacattatatctggtctgctagctgtaagatagagtaatgaaccaatcatccctctatatttggattcatcaactttctttcctctttcatctgaatcaagataagttgaagtggccattggagttgctgcatctttgcatttgtccatttcaaacttcttgattacttcaaggcagtacttggattgactaagaaaggttccattcttcaattgcttgacttgtaatcctaggaagaatgtcagctctcccatcatagacatctcaaattcttgttgcattgctgcagagaaatcttcgcaaagctttggattagttgaaccaaaaataatgtcatcaacatatatttgaaccagtaaaatatcattcttttgcttcttaatgaacaaggttttatcaacattgccccttataaaagattgatcaagtagaaacttactcaatctttcataccatgatctaggtgcttgtttcagaccataaagggctttcttaagtttgaaaacatgatttggatgctgaaaatccaaaaatccaggaggttgttcaacataaatgtcctcctcaatatagccatttaaaaatgcacttttcacatccatttgaaaaagtttaaatcccatgatacaagcataagcaagcagcagcctaatagcttctaaccttgcaactggagcaaaggtttcctcatagtcaataccttcctcttggttgtaaccttttgcaaccaatctagctttgtttttgactataattccactttcatccagcttgtttctaaaaacccatttagtacctataggtttaatggatggaggtttagggacaagttcccaaacttcatttcttttaaattgatttaattcttcatgcatggcatgcatccaatgttcatcttgcaaagcatgattgatatcttttggttcaatttgagaaacaaaagccatgtcacaacataaatttctaattgaagatctagtagagactccctttgatacttcaccaataatgttgtctagtgaaagatctctagtggttctccactcttttggcaattgttttggtgttaatgaaccttcttttacacttggttcatttttctcattgatggacatcttctccaattgaatattctgttctgaatttcctgcatcatcatcacaaactttttcttcttttgaagagttagattcatcacaaattacatggatagattcctcaatgcacatggttcttttattaaaaactctatatgctttactttgtaatgaatattcaaggaagatagcttcatcagtttttgcatcaaacttcccaagtgattcctttccattgttcaaaacaaaacacttacagccaaaggttcttaagtgtgaaacattgggctttcttcctttatacaactcatagggagttttctttaaaacaggccttatgagaagtctattcaaggtataacacactgtatgtacagcatcagcccaaaaatatttgggtaaacttgtttcatttagaagtgtcctagcaccttcttcaagtgatctatttttcctctccacaacaccattttgttgaggtgttcttggagctaaaaaattatggttgattccattttcttcacagaatttttcaaaatcttcattttggaattctccaccatgatcacttctaattgaaacaattttacattctttttcattttgaataactttggctagttttcgaaatgatagaaaagcatcactcttggattttaaaaacaaagtccatgtgaatctagagaaatcatcaacaataacaagtccatagtaattgccccctaaactcatggttcttgaaggaccaaacaaatccatgtgtaaaagctcaagaggtctagaggtggaaacaatgtttttactttgaaaagaaatttttgtttgtttccccttttgacatgcatcacacaatttgtctttctcaaatttgagtttaagcaatccaatgactaagtccttcttaattagcttattcatatgatgcatatttatatgactagctctcctatgccacagccatgtttcatccaatttacttaataaacatgtagttttgtgaaacaaggcatgatcaatagaaagtagatacacattacctttcctcttgcctatatgaattacctcattacttttgccatcacaaatcaagcaacaatcttgattaaaggatatcttgtagcctttgtcacataattgactaatgctgagcaagttgtgtttcagcccttcaacataaagcacattgctgattttagtgtttaagctgtcaccaatacttccttcacccataatctttcctttattgttgtctccataagtgacaaagcctccttctttaaatgtgagattcttgagcagagacatgtcacccgtcatgtgtcttgagcatccactatcaaggtaccatagagatgagcttgctcttagacacacctacaaaagagacaaattactttgaaggaatgggtacccattttcttatgggtccaagtgggttagctgttttctttttcttttctacccaaatacactcaccatttgggacatagaaccttcttgcaaaacaacgaaaagctgcatggccttttttcatacaatagtgacaagttacaacattgtatctttttctagaaaaccttctttgattgactcttggccttttcttttgctgctgttttgggagtacaaacttagttttctgcatatttttaaagctctttttatatcccaaaccagaggtgtctccatattgtttttgagcactcaacatttcatctaaatcacactttcctctgttgagtttttccaagatgtcaatcaattcttggttctttgaaacttgctgcatatactttccttcttgattaattctgtattcatcaaacacattttgcagcatttcatacttatcactagaggtagaagaagaagtgcacatacatccacttgatttgtaacttgaggttagactatcattttctttcctcaggttacaaatctcagtttccagctcaattgtttttgcaagatgttcttccatgctctttttaagcttgctatttgacttagccaatttttttgcttctttgtgcatctcttgaaatgctaaaatagcttgttcaagttcagaagttacctcttcatcttcacttagcagatcatcattttcttcattgatgatggaggttagacacatgtttgcttcttccaaatcagcagaggaatcagaggtagaagtatcattatcttcccatgcaatatatgcttttcttggtttaaattccttcttccctttgttgtcctgctgttgtttcttcaagtatacggaacattcagattttatgtgaccaggtttgccacattcaaagcaagtatagttgttatccttcttcttgaagttgttggagctgctgtttgttgaattgttcttattatttcttgagaactttctgcctttgtttttcttcatgaatttgctgaatttctttgctaacaagttcatgctttcatcttcctcttcttcactagagtcctcatccttttcagccttgtgtgttgcagattttaatgcaattcctttgtttttcctatctgcatcttcaccaaaggttagctgagatagttcaagttcatattcaagcaacttactaaaaagtgcagccattgacatctttgataaatcctttgattccttgatagctgtgactttgggttactatgctctagtgagacatttcagaatcttgatgttaagttcttcagcatcaaaggttttgccaagtcctaggagatgattcactatgtgtgtgaaccttgtttgaagctgggaaatgctctcattttgattcattttgaacatttcatattcatgaatcaaggaatgctttcttgaccttcttacttcctcagtaccttcatgggtgatctccaacatctcccacatctccttaacacttgcacatcgaacggttctgaaaaattcatcagaagatagagcagaagttatcatattctttgctttaaaatcatattgaacaattcttttctcatcatcattcatctcatcccaatctttgggaatcatgttgttatctaccatcttaataggcattcttgggcctttctcaatagcattccatgctcctggatcattggattggataaagatcttcattctatttttccaaaagctgaaatgctccccctcaaataaaggaggtctgtttaaggatgctccttccttaaaggttatttgtgaggtgttcattttgataaaaatgcagtgatcttgagtatcttacaagacctagctctgataccaattgtggaaaataagaaacactcacaattaaccaagagggggggtgaattggttaagtatagatattcaaaattttcttgttaaaaatcagagttaaaaatgcccttcggatctttgtcacaaaactaaatgaatatccttatccaagttcaatccaagacttgatatgcttaaattttaaacacacagaaaacagagttcaatcagaaacaataaagaatgcaataattaaaacaagaagcaagatttatactggttcacctcaaaactagaggctacatccagtttcttctactcaacactagagtagagttctactattgcaaatatatttcttacaagatattacaaacttccctttctcaaccctagagaaagttcactgatctaaaaccctattagacccttagaagctacacccaaactgagaaacctactcagttatacatggagaaaccctatctcccttgcaagacaaccaacttacaatataaccaacaaaaacagagttactgcagaaaaacgaaatacccacaaagatttaggaaagaattcacctgatgatccaagatagaaatgcaaatgaatgaatgacctcaggttgaatgtaatctaaagatgcagaatcaattcctaagcctttgtgactgagtaagcttgcttcactaacaatcttagttacccatcaatgaatcattgaagcaagactcaagaacccagaagaaacttttgtgaactcttagatgcctttagagaatgctcagaaatcgtaaaaaatcaactcagtaatgatctcacttagttctttttccaaaaaggcaatgggttctatttatagttgaaatcgtaacagagttaatcgattaaatgcgctccccacgctcctgtaatcgattaaaatcattaatgcagaatcagattttcaactaatggttaagataatcgattaacccgatacgtaatcgattaaatctgtttgagcaaaaatactgattgtaaagtgtaatcgattacatccaattgtaatcgattaagtcagacatatgctaaaatcagttttataaagaataatcgattacatccagtggtaatcgactaatgcagtcctacacttaaatcatgtttgtgaagaataatcgattacatttaatggtaatcgattaaggcagagtgaccaagtttatccaatgagcatgtaatcgattacaacaccatggtaatcgattaaagtagtcacacgaccaatttttcaaatatgctgagttgtgtgtaatcgattaaccaataaggtaatcgattaaagtgtttatgcttggttttccagaaaccttaagagcaaaataatcgattaagattagccagtaatcgattattgcttctttatgctgttttcttagctttctcttaattttctaattaactgcttaactcttctatgatgcaatacttaaatgatacatgaatgctataatgacttggatcatcatgatgctttcaacccttttacattaaatcacaaacaatcatcttcaatgcttgatccatgttgaaagtcaaaactccaagacttgcaccttgattgaatctttacttgatcttcattcagttccccctcaactcaacatgttcatcaatccagaggcccaaggccacacacttgaagccacaggtgccaaaacaccctcacactatctcagtgtctatcctagggttcatcatttcagcccaacacacactaggccatcatatatattcatatttctggaacggtttgagtttcactcaaagtaccgttcatctagcctctcaggctctaaacacatataatcaataatgacaggccaccatggcctttctcatgccatatatatatatatatatatatatatcaccaattgcatggcatatctaaacatcacccacttgggtggcaaccagaagcaagggaaaaaccccaaaacaatgagcttacctgacagttgtgcctgcaactccagcctcttgaacaatggtctgcttctctgacacctcgtgtcaagccctatcaaggcaaccaatcgcatatcacagaccattcaagcacataaacaaccataagctcatcagatagtcctcaactgcctcagagaaaggaacctcagtcccttctatcaacccaggttatctacctaaggttcctcaggctcatcctctacaagcctttccatagaccctcagtggtctatctcagatcaaacatggccttagagtcctcatagactcaacccaagccattcacaaagagcatcacaactcacaccacccaataactcacggtttccataaggcttaaacggtctaatcacgagacactgttcccatggcctcacaggcaccacaagcctatcattttggctctaaaatgtctcaaatcaagtgactcagtccaagtcacacatgcacaacctaaagccaaaaccaacattcaccaaatcactaactgaaagctaatccttcctcctcacatcatcctaaacacatctctcaactggactcaaagctaattctagctctatcacaaatgggtcactactcacccaaaaccccaaatcttaaaacaacccaggaatctcgagtttcttacctctatggtgacacagaggacctctgagacactcctccaagcttgggtgtccgtgggtagctgccaatcctctcaaaactcgagtttttcaacttctcatgagaatggggtttttggtgaaatggaggaaggattctaggtcacaagtgatttccaggaggtttgatgggtttaggaagtgtttagggtcacaaagcaaggttatgggagcttgggaacctctcccatggctgctggcgtccagaggaagaagaagaaggttttcttcttctgaaaatcgtgacagctcttatatattgggcctgtccgaggtctagcgcgatccggcgccagacctggcgctacccgtgccagaaaggcggtgggtctggcgcccccagcgccatccccgcgccatcagcgccacaatcctaacccaattggcacccccagcaccaactatggcgcttcaggcgtggacttccagagaaactggcgccacattccagtgggtctggcgctatcagcgccagccctggcgctaaccgcgccacacccttaatagggttttctgctaaaggatccctacgctatcagcgtgggatctggcaccacccgcaccacagtgagggtccttacaattcttcccatgttttcattagtactttcttgttttttggtttgaagtgccttttcttgtgatctgacttatcaaggtttgggcattctaacttgaagtgtcctggtttcttacactcagagcatatgatggaacttttatccttgtcctttctttctctatatggttgttagatcctttccagtctgatccactttttatcttccatatgttccttatcttccttgagatcaaggctaactgatcatcttcttctaatctttcatcatcggactcatcatcgtaagatgtatcagtgttgatagctttggatgagcttctagaagcaagtttggatgaagattctttgcatgttggagaggctttggctttctgtgttgttagagcgaagggtttgccctttttaaaacctttatattgttgaagttcttactcattaacctttaaggttccaatcagttcttcaatggacatggagtccaggttacaattctcattgttgtcacctatggtctcctttttctgaataaacttcttagaattttttcaatgttatcataattatcaaaagttcttttaagacaatgtaattcatttaaaatagttaggaagcattcaaacaaggtttgtatatccttaccatcttccatagtaaaaagttcacacttacatgtcaacaagctaaggttgttgcattttacctatgatgacccttcacacgtcagagctaatgtgtcccacaattgttttgcacttctatagttatggaccttagtgtattctataacaccccaaaatttcagaactatagtcaaatatttattaatacaagtcttaggttatgggagaattaatggtctatgttcaaattatttgggtgaaatgttaattagaggcattacaaaaatgtttggggaaaaatgaccatatcgccctttccgtaaattagaaatgacagaaacgcccttgaggttaaaattatgaaaatgccactagatattttagttagatattttaaggcgaaaattacacaaatgcccttggatattttggaaatgacaagaatgtccctagatattttggggtggaaattacacaaatacccttgaacattttggataattatcatcacgtcccaagaataataaattaccataatgacctttaggccaaaaatgaccacataccctttgagagtttgtggaaacttgatgaaagtatagagcactcttagatagaagattattaagagattttgtgacaagaaaccttagaatagaatttctatgaattttataaggtgacaactttgaaattgtattcagaaggattcgggcatcagaaaaatatggaaaaatgagaaatagaatctgtggaattttctctcaattgtaggatgtttagatttatctaataaaatgatttagtaattttaatggtcagaagaaaaatagaccaattggaattaagataagagcaatcttgagcttgaggtctgtatagtactctgtagagattggttatgagttatttgtaatgaaactaaagataatgtttggagatctctggagttctattatttcatattatctttaggtgaaagaattcaaattaaaattgacttcctacaaggaattaccatgtggaaaaccataattgaaactagatttttcttaaagcatcaaaaatgacatttaatggcataaaaggaagaaaaacttgtctttcttccccttacgcttgaagtacacgtgaagaaggatgtagaatgggcaagaaaattcatgaataagccacttgtataggcaagcttcatgaaagagacaagtggttgacacttgggacatgtatacaagatgggaagaaaaatcttctcttgtctcctttggtagaacacgtggacagctctagacattttttcaacaatccctaccgtcaaaagttaatgaatctagcggtgtacctttaaaattttaaggagatccagcggttaacgaatctagacttaggattttactaaaacaggttttgataaaaagtggagaagcttcaagacatgccaactaagtgggaaacttgtctttcttccccttaagatagatgatcacgtcatgaagagtgtagaagggagtagaatcttcatgataagccacttggaaaggcaagccacatgaaggaaacaagtggaaggacacttgtatggtgcaaaataaagctcgaaagatttttcttataaagtaaagaagtcatcattaacttaattagaattcaatggaacaagaagtaattaagttaggatgaaactaaatgaaggtaatttagttagaatggaactaaatgaaggtaatttagttaggaagggcaaaaatgtccttgaatattaaattatttcctaaacactatataaagggggggagggggacctaaaatgcaaatcactttcaagcctttctctctactaagttcacgtgaaacccctcttccatatccctcccatcctttcattttcaagcctaaatcaagttagaaagtaaacctcaccatagtaaagcatcacgtgaaagctaggagaagctagggaaaagtttggcaagcttttaaaagaaggaaaacaaggtatgtatggggaagctttatgataaatatagtttaagtattacttgtgttgtatgtatagggaagtttatgctaattatagtttaagtattactttgtttaagtatgtatagaatttcatagaatttcatctatttctataaagaacaaagtttgcacaccatgtgtttgatgaaatgcttcaaagaattaaagatagtttaagtgttgttctgtttaaataaatgtttggaattcttgtgttgttgaatgtttctatgaatctttatgaagttcaggtgttgtcaagtgttttatagatttctatggacttcatatgtttctatgaatctttgtacatggatattatattgagttctatactggatttatattgaatttttggttaaagcatgtgagatataaattgaatattgatgttgaaaaaaaatatgagatgataaaataaggagagaatcaatgttatatgtctcatatgcatatgcccgacgggggttagaccgtgttattgcctcaagaggaggtgtgttagatagttataggaactgagttcgagcgttcagacaatgaggagtctgagctggggggtgcttcggcagtggggaaatcacaccacccatgatgatcacatgtagtgtgggtgagaattttgtgcaccactataacaacttgactgatcgtttcagttctggaccattggactggggctatcttgactgttggtaccaaatgataaatgataaagagagaatcatgcatcacattttatgaatgttgttatgaccatctatgaatatattcttttacttaaattgtgtttaacataaacttaccctgtattttgtgtctatggatgacacctaccatgaccccaatttatttggacgagcaaaggaacagtaaaggactagcaagatgatggattttgtggaagatgttttggtacgttttgttaaagatgctttattacgtttgtaatatcttagttattcgtactatgtactagaactcatatttgtatgtattatatcaaacttatttgtatgtatgataaacatgttgtcgacacgcaccaaaacaattttactaagctaattctgtagcatagagctaacctaggtcgactcagagacatgatcaatgttctagcttcaattcaatggtaacagtaattggggaattttatcaaacagtttgtatgcgtaagtaaaacttgcaaaaacgtaaactaaaattaaagagcaacacagaaatcaacaagattatcaacaagtgagtaaaacagattagagaagcattaatccaattcaccaaaccaagcaattcgaatcatcatcattcttagaattttatcctatcatgaacatccattcaatctcattagaagttgtttaatcgaattaaccctaatttaattgaaaccacaaccctaattgaaatatcatccaattaattttgtgattaatattcgaaattaggcatgaatccataacctaatccgctttcaatcctaaacgcattcataatcatgaaaaacagaatagcaattgaagaagaagatgaacattcaagtagaatttgaaatattaaaccagaactccaattctccttgtgtcttggttggttccttggattgattggtgatttagccttccatgatcatcatcaatgaaagccccatggattgagtgcacgaaaatgattggttcctcagatacgtcaagtgagccaaaaatccaaaaatacgcaacaattagcaattaagcccacttacttgcctaggcccaaaaactgaattagaataggaaaataaaggtcaaagagaggtcaaataagctaagaaggatagaaaaatattcaactaaaaaccctctatcaatgtattatattgaacttttaaatattaattagtgacaaaaaccttttgagatcaatcattattaaaccttagtttgctatttcatttacaagagaaaaagtgttttcggtaaaaattaataaaataaaatgggaaatcgagacgttattaatcagtagtggaaatcgttttgaatatcagtcattagtaaatttagtttggtatttttaagcaagttgaaaagaattttcatcaaaaaccaacaaaatataagatggtaaattgaggcgttacatattcttcgtcagagaaagcatataacatagtgttttgagctttagagttcaacaagaacctttatctttgagcgtctgttgttgcgtactcggcaagtgcaccggtcgctcaagtaataaagtgataaagtagagttatcgtcccacgaggattgtttgaccaattaaattataaatcatattgataggttggatgacaaaagatatgagagaaatgtgtgtggacaaagtaaatgtaaaagctaaatataaacataaagtatatacacaagatagatgatggttgtaccaaatgtaagctaatgtagctagagaacccacactccatgctcatgacattcttacattgattgtttactacattcaactacaccaattactcaatcatgcatcctcattcattaatagttaagccctaatcccttagtgacattaaccctttaacccttttcaataccctaattccttagtagcatttattaggttaagcattaagtgatgtattagaaaggattgcaagcatgcatccctatccctaggtgatgtaaagcaagtcaccacacttagttcctagattaaagccccaatatccctattgtgagccctagctctgagctctcaactaggttggtcaagtctagaaaggagatgaagacattcaagcaaagtgtaatgaaataacttggcataaatgaataattacactcaatccaatccaaatgcaagtaacattgaatgtttagcactaattacaaaagaaaactagccaaacctaacatggatggccttggtacaacaaaaagaagcatgatgctgatatacaaggaagaagaggaagggaagagggaagaaccctcttcccttcacacccaaaccctagctcagctcccaaggcttctttctcctcctttggtagtgattttcgtcaaaaagccctctccaatgctgaggcttctgttatttatagtgtagcccgtgaaatctctgttttaccctcattatgaagactctacgacttgtggcgctcctggcgcgggcacggcgctgacagcgccaacatccagaaggaacggctctcctagcgccaacacagcactgatggcgcgagctgaagaaatgtggcgtggatggcgccatcccggcgctgatggcgccatggtccagagaggtcggcgctggtggcacgaatttggcgctgatggcgtgggaccttctgctctgcataattccttgctaattcacctgctaatcatccaatcttgaccaaagtacctcattgaagcacataagttatattcacaccaattggaagctatttatcagataaaatgattcatttaatgatctaattgcgcttggaaacatcatgtgctaggcacatatcatctgtccaagaggttcttgagacttcgtttagttgattgttcactggtatgtaattgccatgttctatgacatcccagaggtctatagtagtcgtatttgatgcctttgaatagtggttgcttgtttgtggaatatccttcttccatatctatttgactttaggattttgctatgtatttgtgaaaatactaaatctgagaggtcgggctttgatgacaactaaaatacaacaaatcgctctagaagggggttgaataatgcgttagtaaaaatataagaccttttcgtaatggaagatgttataataaacaagttcataaaaaccatcgtctagtggcaaaaggtggactgtcgtccaatgaagtgcaaaacttgtctttcagtgaaaccttgtgtgccgaatgtgacagtgataaacacgttgtcgagacgtatcaaaaacaattttactaagctaattctgtagcacagagctaacctaggtcgactcagagacacaatcaatatggttctagcttcaattcaatggtaacagtaaggggggaattttatcaaacagtttgtgtgcgtaagtaaaacttacaaaaacgtatactaaaattaaagaacaatgcaaaaattaacaagattatcaacaagtgagtaaaacagattagagaagcatcaatccaattcaccaaaccaagcaattcgaatcatcatcattcttagaattttatcctatcatgaacatccattcaatctcattagaagttgtttaatcgaattaaccctaatttaattgaaaccacaaccctaattgaaatatcatccaattaattttgtgattaatattcgaaattaggcatgaatccataacctaatccgctttcaatcctaaacgcattcaataaacaaggaagaacagtagagagaaaatgagagcaagggttttgatctaaaaactaaaggaatgaaaaataaaacttgtttattgaaatgtaaagaatggtgtccaagttttcactaaagtcactaatatatgtagtgactgagctctgaaaataaaataggccacaaacaagcccaacaatctaattatttgctatttacaactatgaaagtcaaattcgcagcccaaatttacaagtgcagaggcgctaacttcaaggctaaaaatgacccactaaatgacagaattggcctcaggctatttctgtcaaacttgcagatcttttcgttatctttccaggaactcctaaaacgctccattcagagattggtagcaccctctaggtcctgcacaagtcagatacatcaagtgagccaaaaatccgaaaatacgcaacaattagcaattaagcccacttactttcctaggccaaaactgaattagaataggaaaataaaggtccaagagaggtcaaataagctaagaaggatagaaaaatactcaactaaaagcactctatcagacagtaatggacaatgaaatacgttaataagctaatgaagagaattaaaaatactcaatttatactgattcactcaaccttagctacgtctagttctcctttacaacctagtaaagggttccactaatcaaccttgattacaacaagtattttttctgccacttctggcttagaagtattctcaaggccattcccgaacaacccttagactccccctaaatctaagaacgtctaagtatattgttttgtcactaagtcacttttggctttcacaaacttaagtttgatatagaatcacagattctttacaacactcaaagagtagttttacaataaggttcttatctctcactaatactttgtattctacaaagggtggactctattgagcttagtgtgtttcttaacaagtggttttcttttctcttgtttcttgattcacgactcttgcctttctttgtacgttcatcaattttcttcaatctttgatgttgtatttatgactattgtgcagattgatcttgttttctgaattaagtagatattgtgtgtttctgtctgataggatcaggactttccatttttgtcactcataactcaatatgatcgttaaacatataaaaggaaataaaagatagtttcaaagatatgtcccttttaaacaaaatcatataaattggaataaattgataattcaaataagttgctcattccactcgttgtttggatgaactgcgagtacttcatgcttctagtagacgagttatccaatattggataagcccctcctggtgttgcttctagtcatcaatcttgttgacttacatgcagcaaagtggttaacacaaatttatatcctttgttttcatcaaaaccttaagagaagtctaggtcgttcagtggtggatcatccagcgtctgacattcatgtctttcctcttttctgggaccttccttaatctttatcattccctccttgtttaaggaaatttgttgatgtgtaaaataagtacttgcacatgggaagtcgtaccatatacaatagtaacaccgaattaaaagtgtggatatcgaacccaaaggactaattgttttcccaaacaattaattttgtaaaactaagcattatatggttaaattaaatgaaagcagttatggttaattgctcaatttagtaaataagaatctaagatataagagttgatgcaaagacaaatataataagtagtctaggattgtgatttcacacttacctcaatttctcctagttttaatccttataaaaccccaaatattgtcaatttccaaattcaattattaacctttggtcatggtttaataacactcttttccttaatcaatacccaactaattatagaaatatcatattaggtcaaaggattaagttcaaaacaagggtgatcaattaattaatctaccgaaattttcataaccaatttgatcatgcaagttacgtagaagcaattgttgattcaagagaagccatgcatgaatgaactggattcaagccttaagtgttttgtgctttcaacatgcctcaatggaaaatgtcaaagaaagctattgaagaccaatttgattcatgtaaaaggaaatctgtgcaatctgataatccaaaagcatatcatgcataatcattcatctagggttgttagattaaaggtctaagtaaaagcaatgaaccagtaaggcatttaaaaagctaagtttttggaaaaatgaagttttactgcattaatcgattatagcattgataaaattgattattttgttcttcgtgccttctggaaaacaaatcaagaacattgtaatcgattacataggcttaaataagaaaatcatgctgactgtcttaatcgattacagcatttcgtaatcgattacatctatgcctatgaattacatgttctactgttttaatcgattacatagtacagttgaaaatatatgactgactgtcttaatcgattaccatattcagtaatcgattactcaatgcatttagaaaaacatgtctgtctggtttaatcgattacttcacggaataatcgattacattgttcatagctcaaacccaaaatttattagaagcattttaatcgattacattcttggtttaatcgattacatatgcgaaataatcgatcacaggagcgtgtttaatcgattattttcagttagaaatcagttataaatagaaacctctttgaaaatgataagaatacttcaacacaaccaagaaggggggtgaattggttgaaccttgtccaattaaaatttaaaatcaaagtattaccacaggatctttatcactttcaaaattatttcaaaaccaagaatcaatattcaatcaaattccttttccaagaagaatagaaaacagagtataattttctgtgcaatgaaattgattcacaaacaaagcaattaagagatgaataggtgagaagaaagattagtctcagatttttatactggttcacctcaaaccctatgaggctacatccagttcttttactcaacactagagtagagttccactattgtaaaaatatccgtacaagtaaatttacaagcctctcttcatcaaccctagatgaagttcagagatccaaaaccctattagatccttagagaccaaaacccacactgagaacactactcagcagtcttttagagaaacactatctcacacttgcaagaaactcaattacaatagactaatccttacaaatattcaaagaacagtttacaccatcaaagaataaggaaagctatcacctgataatccaagaatgaatgcataatgaatgattctcaggttgaaagacaaattacaatcacatatgcagtcctttccttatgctttgaatgaatgaagcttcaccttcttgaatcaaaaacccatatgagattttgtgaagctaagtatgtttagaactcagagaaactcaccaatgaaagctcaaaatgtttgtgaaagcccagaatacgaaaaatcaaaagttgcaaacttcagagaagtgagttctatttataatagatttttaactgaaaataatagattaaacatgctcctgtaatcaattatttaccatttgtaatcgattaaatcaagactgtaattgattaaaatgttcctaataatttctgggtttgggctatgaacaatataatcgattattccgtgaagtaatcgattaaaccagtcagtcatgcattctaaatgagcttagtaattgattaatacgatatgtaatcgattaagacagtgagctatgttttttctaagtctatatgcataggcttgtaaccgattaccaactctatgtaatcgattaagacagagagttccatttttcataaaaagccttagtaatcgattaaaccgatatgtaatcgattacaatgatcatgatttgttttctaaaggcacgaagaacaaaataatcgattccagtatatgtgtaatcgattactttagtaaaactttgtttttccaaaaacttaaccttttaaatgccttagttatatactgcctttgattaaaccttttaatctaatgatcctaaatgaatgattaatgcatcatgtgcacaattggattatcagatcatatacttccttttacaattaatcaaattggtcttgagtgctttccatggaactttgcctttgagcatgttgaaagcacaaaacttttgagcctttgattcttgttcattgatgcttggcttcacttgaatcaacactcttgctctatttttgtgacttttgagaaattcgaatactgagcattcacaaacgttcatgagctttctttagtgagttttctgagtttctaacatcaaataagctccacaaattcgtatgggtctctgaattaatgaagtgaagcatcatcattgtgtcaaagcataaggaaatgaatgcattgagtttgtaatctctctttcaacctgattgaatcattaacatgcatatgttctttggattatcaggtgaaatctttccttagtctttgaaggtgtaattcttttaattgaattttgtaaagattagtctattgtaaatgggttttcttacatgattagagatagtgtttctctaagggaagctgagtagtgttcacagttttgggtttggtctctaagggtctaatagtattttagacttctgaacgttatctagggttgataaagagaggcttgtaatatcttgtaagaatatttttgcaatagtggaactctactctagtgttgagtggaagaactggatgtagtttttgaagtgaaccagtataaaaatcagtggctaatctttcttcttatctcttcatctctaaattgctttggttgtgattcaaattatttgcacagaaagttttgttatactcattgatttcttgacagaggaatttgattgaataaataattcttggtttcaatacatttttaaagtgataaagatcctgtggaaaaactctgatttgaaattttaatttaccaaggttcaaccaattcacccccctcttggttgttttgaagtgttccttcaataacacagagatggtcaatgtcatgcaatagattaagattcagagtgattaattctgaattaacaataaagaataaagaaaagatttaatattgactaaaaacatcaagggtttcattaaaattaaaatcaaggtacaaaagtatgactacatgtagtcatactcttgtaccttgattttgaactagggagactagccactcatgatcatgacaaaactagaaataccaatgaagaacacagacaaaccaaaagagaaggagacttggccagaattcatcccaaatgtgatcttttactccccttcttcctcagaactctcaagaacctaaataaaacaaaagaccttacaaaagagagacactcattccttattgacttaatttatcactcaattttcattattttgcaaatttttccacccaagttttattttcacaaatcttaccacccaggttttcgatttttgcgcattttaccaccactaacaaaatatgaatgattttgacttttgacatcgattgtaattataaccgatgtaggaagtgactttttgcattggttataatcacaaatgatttagaaagtcatttcatatcgttttgttaccaacgtgatagtaaaatggacaaaaattgaaaatttagatggtaaaatttgtgaattgttgaaagttggatgataaaatttgtcagaaaacaaatttcagtggtaaaatccataaacttataaaatttgggtgataaaatttgtgaaaataaaacttgaatagtaaaattcacaaaataatgaaagttgtggtaaaatttgcaattaagtgttccttatttctaatattatgtggaggcctttcttctatttttccttaatcaaataatcaattatctcttaattttatcaattaattaggattcaaatctagcatgtgatcattgcaatctttaactgacagatgatgcaagcggaccacggccgtacaaaattatcaacatgtacaaaattattgcagttgtacaaaattaccatgaccatgatattgtgattggctccaaaagtccaagatttttaggtgtttttcacataaatccttttaggcatccgtctttcacaaacttataccaaatcgtgagttttccaaataaaatatatcagaatgcatcaatatgacatgaaaactcacatcaaaatacaatcaaatatgggtttatcattcgtcctcaaatttaaggctccaatacccacatcataggatacaagattagttacctctaatgtttcattatgtctatacttatgtagcatgttaactttataggtttctttttaaggatcaatgatgttcttattccaaggtagaataaaatacaatggagctctaagaacaagagcaactatgtgtttggctcttcccaatgaagaacctttaacaagatgccttagttatgagaacttcttggataaatactactaatgtcctgcaaaagatagttatcaacacctaatacattagagttattatccatacaagtttccttattagaacaactatgtccatcttgttttacccaacaagctctcttgccctctctgtcttctattttcaaaatttcctcttctttttgtttctctttctctctttatttctttttctttatatttctctctctctctctctctttctttacttcctcccatgacttcttctatgtttgtctaacattatacaaaattcttctctttttcaaggactttcttcaagttcctttttagatgttgaagttggagttctatttcctcttccttagccatgcttcaaagaaagaaggttagtggacataaaaaattatagacctcaacaatcttctcacaagtttacactctaagatgatttcactcatgtttctaaaaaatggctttttattgatgaaaacactccttttctttttatgactcaagtcctttttacaagttcttaaatagaaacctctatgcatatcaattatcaaaattccatacaattgtaattggttttcacaagatttatcgctaaaaagtccaagaaagagaaatattctagacaaaacttaaggaaattttaaaagacatgcaagaaaatctaattaaaaaaatactcaagaacaacttcaccttttttctttccacgctctattgcaagtctgccactcataaatcttgtgacctctaaacccaaaatggagtcttacattgacgttgataattgccatgaattcctatattttggtgtcattttgggacagttagttgatatctattgtgcttttgaattttgtttatgtcaatttgagtaaagtttgaataaaaagcaaggtttaactagtttatgcctttgatgcttgatctttgtttttttcttatgttttgcaggagctttgtggaagcaaggaccaagcaaaggagatgtcctgagaatgatcttgaggcatcaaggatcctttggtttgaactctagagatttggaggttttgcagaggaaaaataagttttttagacttttggagtcgtgcacacctgtggaagaaattatgaaggaatttgtgcacttgtgcaatgctgaaatttgaagtggctgagaattatacacctgcagagcaagaccgtgcacatgtgcaatgtctagtgcgagaattccttattatttttcattatgttttgtattgggcttaaactctattttagcccattgctttaaataggaaaagtttaacttagtttgggggctaacattttaagtttgagagagagaaagagactgagatgttcttaatgactttagatgcagagggatttgttctccattgtttatccacaagatttttctcctccatggccaatagctaattttctctcttttgttggggtttaacactgttagtcatactttcatgaaattgctaacttatttctatttaataaagtattattattgctcgtcttctatgctcaatgcttgtatatggcttgatcatctgtttgcatgattttataattccaattgtaattaggaaattcttttgaattgaaaattgaagaatacaaccaatcatttttatgcctagggataggtacagagcattgatcaacattaaaagctttttttttttttttaaattaactaacttggttacactaattcaagggattgatagtggaatcaggggacttaggttttctcacttaagggattaaggcttggataattttgtgggttgatgataatataaatttaattgaatagtaatttgtggtgacttcatgttaggaagtctaatgaagttaaactgatgacccttctcataaattaaaaccttgtttactatgcacaccaagtgcttgataatttcaaaattgattcttttgttttttaatctttattttgatgcaaacttatttaatttgagttactttcagcaaaatcttcaaatcaatatttctttcccttacttctctttttatttctttcctttatttccctttatatttcttttctttatttatttattcttccaatatctattagtctaaaattttactattaatcaccaaattatcgcataattccctatggaggcgatattttacttatcactttgttacttgagtgatttggtactctagcaaaaaaataatcccaacaagtttctgtcaaatcaattgtcacaataggtggaggctcaacaagttgttgtgctagaatgagccaatctagaggtcttgtttatggattcattagatctttgtccagtctggagaagatctgagaagtcctataggcttggaagcaatgtcaactgcttctttgcttccatacgctttgccatgatttcaatggatatagaatttttcacaccatatttttctccctttctcctcagtctgtcctcatccatttcatcagacaaaaaagcaacaacaagttgctcatcagctttagatactagtcgtggatacactcattctgcaccagggtctgtttctactatgtcatcctcatcttctctaagagatgcttcaatgacagacattatgctaagtttatttatttacaacattttttcaaatagatagcattttttaaacgctatctcagaggatgatgtatattgatatatagtattcgcaaaaaaccactatatatttgaaactgatattcaacgcttatccaaaaaaacattatatttttgtgtgtatgtgtgtgtgtggaacatgacaacacttttaatgtatatataacattttttaaaaggaaaagtgctatctatctgtcagtattcaaataagtgctacctattatggatatattttagatgtattcagaacattctaagtagtgttattttgtattttatatctttcctttgccagagctacataagaagcatccttcaaccaccataaaactatgaaagttaaaatacaataagtagataaatattatttttctccaagtttcttaagaactcacttctacttgaaatttggctagctgcatcgaattaatcgactgcccaagccagttttagaagaaggaaggttttgtagcttaagataatcaattgcctcatttgataattgattacccagctcctggaaacaaaagaagatctttttttgaatctataatcgattaccaaaaataataattgattatccagtcagcacagaaggaacgaatattctcatattgaaacaaattaattgattaccagtttttggaattgcataacaaaggggattttgacaaattaattgattacctgtttctataatcaattagatttgttttaactatcaaaatttataaatacccctatctattttcttcttaaaaggactcttgattcatttagaatttgtgaaaaacatttgaagagagtcttaaagaagaatagcatgcaatacgcctaaaggctgaagttgatctacgaatcactcattttacaatcatgtattaatcaacttgtggaaaaaatattaaagatcgaagagtttcacatttcaggtgtattcaatcattatttttttaatctttttagagtcttgttcttggttagagttactagggatgttgaagaattgataggtttcaattctagatctttttcttatagggttcaagagaaatatttgttttctattagagaattgtgtgtggatagcatttgtactagtgttctctatataatggatgttctaagaagacttagaacaaattggatgtagatccagattggactaaaccaatataaactcttgtgtgattctcttattctctataactttgtgttttgtaatcatcttgggagtggaatcgatttcaaagggtcatcataaaaatttctattttctaaagatctttcgaggaaactttgattgatttaaagggttgtttttaatcgatgttaagaatgatttggtaaagattttcaaagaatctgatccaacaattggtatcagagctagggtcttcaaagttaatcaagattttgtcaaaggtttcaaattatggctgcaattaattgtcattcactgaggctgcatccattaataaaccatcattgttttgtggtatgaactgccctttttggaaggtttggatgaaaattttcatggagtttgttaacaaaggtgtaacgccccaatctactaatcagggtcattactgtaacaccccgtgtgcacccggtgtgtcatccttaataatatcatgagcgcgctatcagcgttatctgaacgcatggcggaagctatagaatcgtttttctcgatatcaatatgcatgaaatataaaacacatacataaaacattaacataagcccctattgatccagatactcaacgtattataacataggcagatacataaaccactatacatagatagtcaggaggaaacataaacaatacatacaacggggtatactcacaccctttacttatacaaattcaagacagaggtataaaataaaactcttctagtcttcatctgcagcccatgaccatctccagcatactcagttagtctcctgccctgtggttgcttcccttctccagaagtacctgaaaaccacagcccacaaaggggtgagataaacatctcagtaagctcagggatctgggatatcctccctttccctggtttaaccccaagcatacacatacacatatcagagcttaaggtatcaccccagctcatacatactacatctaggaccttagcctagctttaacacatatctcagctctttctggatcatcacactagatccatcaatatcagaggtcacatacctcatactggctctcaagccatctcaactcatctcatagagccacgccatcatcatggcatacatatgttatactggctcttccatacatctcacagagcttaaggccataaccatggcaccaacatctcatatatactctcagagctcgtctcccagaggtctctcacagaggtactttatcacataagtgttcctaactgaacactgctcatacttagagagacacaatctccccaactcatgcaccatcactgtgcatctacctgactacaatcaggttactctcatggcttaccgccattcatcacatatcattatctatgtgattccgatggttattaccatctatcacctatcttcatcctgcggaggctattgcctatataaggccatctcatggcaggatgtcactatccatcatcaccatcctgcggaggctattgcctatacaaggccatctcatggcaggatgtatcagaggcgcttccgaggatatataggtacaaccacgtctggaggtctcctatatattggtccaacctctatcatgagctacaactcatgtctcatcaatacaattcacctgaggaggctacatctgtgagtataggaacatctctcccaaaggaggctacctctatactacaggaaacatctcatgtcaggtcatcattatcataattacatgtctgagagagatcatcccacgacggaggcactcatccctcagcctgtcacaccaccacctgagagagatcatcccacgaaggaggcactcatccctcagaggctcaaccactgcctgaaagagatcatcccacaaaggaggcactcatcttccaggacttccactatctaggagagaccgtctcccgaaggaggaactctatctcctagaaccgcaaaacccactatctaggagagaccgtctcccgaaggaggaactctatctcctagaatctcaaaaccaattatctaggagagaccgtctcccgaaggaggaactctatctcctagaatctcaaaaccaatgcctgaggaatcactcatctcaggaactcaatcatctctgcctaaggaaatcacccgtccttaggtctttaacagagagcagtggcacctcccatggaatctcagctattccagggagtcctcaaactctaccactggctagggaaccttgtctagcctgataccctcgcggtatcctatagattccatcacagatcttattcggatctgtaccacatcaagtcctggaacacaacacagtgttcatctatcttggcccaaggccgtacctgctaccacaggtgtcacacatccttacaccgtctcggtgtctatcctggggtttaaccatttcagcccagcacacactaggccatcaactattcaatcatccatatctggccatcaaggcctttctctcctcagcatgcacaaacatatatgaatacatataaacaagcatggcatgcaataatcacctcacttgggtgataaacaagagatagggaaaaacccccagaacgatgagcttacctgacaagccgagcctgcacttccagcctctggaatgatgatctgctcctctgacacttcgtgtcaagccctaacaaggcaaccacacatatatcacagaccattcaggcatatcacaacatcagctcatcagacaacatcaattctcagcctatacaaggctacagagtctccacaagactctgattaggctaacatagagcatttctctgctcacaatagccaaaactcaacttctcataatcaccagtttccaccggtcaaactcatctatatcttctcctgagcaactttgtcaactgctctaaggtccagactagtcaaatagtcgacctgttacctctgctcagactgcctcagagccaaaatcaaacttcatcaataatgatgattcaaggctctaaactcctcagaacagtcctctgagcataagactctacagagtccgagcctaataacggctctaacacctccaaaaacacccctcaagataaccccaaaaccccgaaatccaaaacacagaaccaacggttagagctcgagtttcttacctctgtgatgctcagaagcgccagggaatcactttccctcagaccactcgctcgatctgggcctccttcacctctgggtctcaagctctccggggttctctctgagaaatctgatctcactatttctcagcttttctcaagaatcaatcgggggttttcactcctctcggggttctgaacacttttccagttgggtcggaggtgtttagatgagatatggagaagatatgaagctctcaaggcgcgtcaatggcggtttctctcttctctctttctcttttctcttttctttccctctctctcagcccaaagggcctcttataaaacatttccgtcgatcccacgctgttagcgtggcatctcacgctgatagcgccgtggactcggccagtccacgctgttagcgtggcatctcacgctgatagcgccgtggactcggccagtccacgctgttagcgtggcatctcacgctgatagcgtgagatgttcgagactgttttcttcatcttttctcaagcctttgtaaagcctgtctctgaatactcttaagcctactcattacccttcctcatgggcttaatctaggcttaattacatgcttaaaacaccaggcattacattacacccctcctttttagaattctgtcctcagaattccactaggcttaacctggtcttactcaagatctacctgtcctcatagatcgtgtaggattcatcagattctttaaatctgattactctcggacctatccatcccattatcaattgggagtcatggcaactctcatgccatacagattactgggaggcaacctcctctccctcaggagtccatcctacacttatgaccacaactagccttagacacttctgattacccttatttcactataaagggttctgtgtctggcacaaaacttttacactgactctgagctctcacaactaacactgatccaacggatctgctcaagagtccactgaaccatctcaggttcaagaaactaattctatctctttcctctgcccaccactagagtcctgtatcactggcctctacagggccgcatccaaattcatggttcattatcactaaccaggaactccatctaggcaggtatctacccagctagttccctattccaaggtactcttactctcatcacatcctctggattcgatggttcaccccatcatatcatccatccgaggataataggctctacaaagccttagctgggttccaaaccttccgaagagcacctcactcaaagaggttacttcggatctctgtcactcactaggcgacatatcagacactagccctttcattggctatgtttctcctcatttctggccactgcgaatcctatcaggatataaacacaccatcgtggccctaggatgtttaatccacccatttttatcatctcagcagagatggcgtccaccagctctctctcttagcaccacagaaaggtttagctcatcataagccaggtgcctactaagagatatcctgctggtcactatcatagccctctcagccactcactggcggggcatcgtagactatcgctacgctactctgatcatcatcaaacttggtccctctcactagagaccagatgatcttctatcctaacagatacacatctctgagctgttcactcagctcacagtcaaagactgtcatcaggcatggactacctccataccatcatcatgctcaagatcttagcacttgtccaaacctcagtaggacacgtctcaagcatactggccctctggccccgcatcaacatgcgaaaacgatcctacctggcgaagctatctcaacgcctggaccaaaggcagatatcataatcgcctatacacatggcataaagccctctatgcccacctacatggcacctccgaggcatagaaggaatctctcaacttctatcccctgggtctatgagaatagccaagtctctgaggcttctcaacataagaaaaccaactaggaggaaccaccatctcctagggaggtccataaccatctatctcatccatcaccgcttccctgaagcgtggtactctccatccacaaatggaggcacaaatacatgcgtacatacacacatataaatacataaatacatcaggtataaaatcatacctcatctctcgtcagacactctgacggctcatctagtacctctggagactctctctgtctggttgtccctctcaggacactctttcgcatagtgaccctgctggccacatctataacatatcagctgacccgtagggcatacaccccggtgatacttcccacaagcatcacacctagaaggtgtacctagcctctgcagaaatcctctctgcctagccccactctgaagtctctgagctgaagacacatctcccagctctgtgcccctctcaactcggtcagcaactctgggtctaaccaccctgtgtccctcagtatgaacaggctgcttgcctcgatgtctgctgagcatagcctcgacttggcgacactgtctcaccaagctatccatatctcgagatccactaccaatcaccagcttctcaatatcctctctaagtcccctctggaacttagccgcaaggatctcagcatctggcatggatctcctgaaatgagcatatttggccagctggttaaatctagccaagtactcatctacagtcatgtccccctggactagactgtcaaactctgcctgcttttgctctcgagcttccctgggaaagtacttatccaggaaacaggccttaaacatctgccaggaaagaacctctccccggcctctcaacaatgctgctgtggtcatccaccactcatgggcatctccctgcagcatataagtcgcatatagcaacctctgatgatccggacattccatcacctcaaatatcttctgcatagcctgtagccacttagctgcggcaaccggatcataacttccataaaaggctggagggtcatgcttacgaaaagtaataagcatccgccctcgggctgcactattcacctctgtctcatcatggggtatctggtcccctctcaggtgacttgcacctgtctgatggcgactaccttcgccctcatacacaggaggtgtaggggatactctgtcacccctcctttggactctgacctcctctaacaattcctgatgagccttcatcaaggcctcatacctctctctgtctgcagctctctgtcgctgcatatcctcctgaatctgcctattcgcagctaactcttgctgcatggccgctatcgcagcagctactggatcagactgggcactggttgccttactgttgcttctggatctcggcatgacactgcacatgtacacaaaacagtgagctgatcaggcccacaaccagtgtaccatatgcaatactcatgtcagatcaacaacaacaacaagcaacacacaattccatgcataccgattctatcaagaaaccgctctgataccataatgtaacgccccaatctactaatcagggtcattactgtaacaccccgtgtgcacccggtgtgtcatccttaataatatcatgagcgcgctatcagcgttatctgaacgcatggcggaagctatagaatcgtttttctcgatatcaatatgcatgaaatataaaacacatacataaaacattaacataagcccctattgatccagatactcaacgtattataacataggcagatacataaaccactatacatagatagtcaggaggaaacataaacaatacatacaacggggtatactcacaccctttacttatacaaattcaagacagaggtataaaataaaactcttctagtcttcatctgcagcccatgaccatctccagcatacttagttagtctcctgccctgtggttgcttcccttctccagaagtacctgaaaaccacagcccacaaaggggtgagataaacatctcagtaagctcagggatctgggatatcctccctttccctggtttaaccccaagcatacacatacacatatcagagcttaaggtatcaccccagctcatacatactacatctaggaccttagcctagctttaacacatatctcagctctttctggatcatcacactagatccatcaatatcagaggtcacatacctcatactggctctcaagccatctcaactcatctcatagagccacgccatcatcatggcatacatatgttatactggctcttccatacatctcacagagcttaaggccataaccatggcaccaacatctcatatatactctcagagctcgtctcccagaggtctctcacagaggtactttatcacataagtgttcctaactgaacactgctcatacttagagagacacaatctccccaactcatgcaccatcactgtgcatctacctgactacaatcaggttactctcatggcttaccgccattcatcacatatcattatctatgtgattccgatggttattaccatctatcacctatcttcatcctgcggaggctattgcctatataaggccatctcatggcaggatgtcactatccatcatcaccatcctgcggaggctattgcctatacaaggccatctcatggcaggatgtatcagaggcgcttccgaggatatataggtacaaccacgtctggaggtctcctatatattggtccaacctctatcatgagctacaactcatgtctcatcaatacaattcacctgaggaggctacatctgtgagtataggaacatctctcccaaaggaggctacctctatactacaggaaacatctcatgtcaggtcatcattatcataattacatgtctgagagagatcatcccacgacggaggcactcatccctcagcctgtcacaccaccacctgagagagatcatcccacgaaggaggcactcatccctcagaggctcaaccactgcctgaaagagatcatcccacaaaggaggcactcatcttccaggacttccactatctaggagagaccgtctcccgaaggaggaactctatctcctagaaccgcaaaacccactatctaggagagaccgtctcccgaaggaggaactctatctcctagaatctcaaaaccaattatctaggagagaccgtctcccgaaggaggaactctatctcctagaatctcaaaaccaatgcctgaggaatcactcatctcaggaactcaatcatctctgcctaaggaaatcacccgtccttaggtctttaacagagagcagtggcacctcccatggaatctcagctattccagggagtcctcaaactctaccactggctagggaaccttgtctagcctgataccctcgcggtatcctatagattccatcacagatcttattcggatctgtaccacatcaagtcctggaacacaacacagtgttcatctatcttggcccaaggccgtacctgctaccacaggtgtcacacatccttacaccgtctcggtgtctatcctggggtttaaccatttcagcccagcacacactaggccatcaactattcaatcatccatatctggccatcaaggcctttctctcctcagcatgcacaaacatatatgaatacatataaacaagcatggcatgcaataatcacctcacttgggtgataaacaagagatagggaaaaacccccagaacgatgagcttacctgacaagccgagcctgcacttccagcctctggaatgatgatctgctcctctgacacttcgtgtcaagccctaacaaggcaaccacacatatatcacagaccattcaggcatatcacaacatcagctcatcagacaacatcaattctcagcctatacaaggctacagagtctccacaagactctgattaggctaacatagagcatttctctgctcacaatagccaaaactcaacttctcataatcaccagtttccaccggtcaaactcatctatatcttctcctgagcaactttgtcaactgctctaaggtccagactagtcaaatagtcgacctgttacctctgctcagactgcctcagagccaaaatcaaacttcatcaataatgatgattcaaggctctaaactcctcagaacagtcctctgagcataagactctacagagtccgagcctaataacggctctaacacctccaaaaacacccctcaagataaccccaaaaccccgaaatccaaaacacagaaccaacggttagagctcgagtttcttacctctgtgatgctcagaagcgccagggaatcactttccctcagaccactcgctcgatctgggcctccttcacctctgggtctcaagctctccggggttctctctgagaaatctgatctcactatttctcagcttttctcaagaatcaatcgggggttttcactcctctcggggttctgaacacttttccagttgggtcggaggtgtttagatgagatatggagaagatatgaagctctcaaggcgcgtcaatggcggtttctctcttctctctttctcttttctcttttctttccctctctctcagcccaaagggcctcttataaaacatttccgtcgatcccacgctgttagcgtggcatctcacgctgatagcgccgtggactcggccagtccacgctgttagcgtggcatctcacgctgatagcgccgtggactcggccagtccacgctgttagcgtggcatctcacgctgatagcgccgtggactcggccagtccacgctgttagcgtggcatctcacgctgatagcgtgagatgttcgagactgttttcttcatcttttctcaagcctttgtaaagcctgtctctgaatactcttaagcctactcattacccttcctcatgggcttaatctaggcttaattacatgcttaaaacaccaggcattacaaaaggcatttggagtgcaatagttaatggatatatcattccaacccatgtagttgataacaagactatagagaaaccttacaaatcttggtcacaataagagattaaaaaaggtgaatataattccaaggcaatgaacattatacatctgatgagtttttcagggtgtctgcatgacaactgccaaagagatgtgggatttaatccaagtcacacaagaaggaacattggaagtaagaagagctcaaaagaatttgcttattcaagaatatgaaagctttaggatgaagctaggggaaactataggggatgtgcagaaaagatttacacatattgtaaaccatctcaatggtcttggaaatatttttgaagaagatgatatcaatgtcaaagtgttgaaatccctcaacagaacatggcagccaaaggtcatagcaatttttgaatcaaaagaccttgccaccatgacacatgctgaattgtttaggaagctggaggaatatgaaatggacttgacaagaatggctgaagaaaaagctatatataagaaaaatagaggtttagcatcgaagactaacatttcatcaagtgaggaaagtgaggatgacaatgcagaagggtcgaatgctgaaaatatgaacttgcttgtgagaaggttcaacaaattccttaagaaaaagaagaattatggaaacaaaacctttcagcgtaagaagaatctcaagaaaggaagaaaccatctttataataaccctaagttgtgacgcgaacggcgcaagcttcggagcgaatttggcgctctaatgaaccatggttgctgaaaaaggtcaattttggagtgttgctgtgagccacgcctgaagcgtgggaagtgctctagaaagtggattttccacgcctggggcgtgggagtgccacgcctgaagcgtgggagccacgcctggagcatgggaagtgctccagaaagttgatttccactggaattccacgcctggggcgtgggaggccacgctggaagcgtgggagtcgcgtcagggcctatataaaggcccaaaacgcgaaaatggaagggaaaacctttctctcttcttcctcacgacctagacctccattggaggtgcttccaagctttgtagggccatgtttgagagcctaaacacctcctgagccctttctatcacctagaaaccgagtgagagcgagaatccttcctccctttcaccaaaacctccagtttctgaggaacctccagagaggtggatgaaagatcgagtttcgggaggaacggcggtggttcagcgtcaccaaggctagggagagtagcctagaggccttcctcatcagttctaaggtaagaaactcgagtttctccgattgattttggatttgggggttttgggtgaatagtgacccatctgtgatagggctagaattagctctgggtctagttgggagaagtgtttagaatgatgagaggaggaaggattagctttcaatttgtgatttggtgatggttggttttggctctagatgagggcatgtgtgacttggactgagtcacttgatctgagacatgccagggcctttgtgatgggcttgaggtgcctaataggccatgtagacggtatctggtgagatagaccgtccaagccctgagaaaccctgagagtttgggttgagagagcttggaggctcactaatgatggcttggttgagtctagaatgactctgatgtcatagatgatctgagatagaccactgagggtctatggaaaggcttgtgatgaatgagcctgatgaaccttagagtagatgactcaggttgatgggaaggactgtggttcctttcctagaggcagtggatgactgctagatgagcttatacgtgtttgatgcttgtatggtctgtgatatatgtttgtatgcttgatagggcttgacacagagggtgtcagaggagcagaccatcagtggaagctcgagctgtgaggcacggctagccaggtaagctcattcttctgggatttttcccttgctttggtttgtaaaccaagtgaggtgaagaagacatgctaagtaacatgatatatatgtatgtgtgcatgctttaaagagaaaggctagggtggcctgttttgatgattataactgttgtgagcctgagaggctatatgaacggtactttgagtgaaactctgaccgttccagagatatatatagaatgatgaaccctaggatagacactgaagcagtgtgagggtgacgagacacctaatgtggcaggtgtgaggccatgtaccttttaagagactgcagatcatgagatggtctgtgatggaacctagaggatactggatgagtatcaggctagttgaggttccctagccagaggtaaagtttgaggactcccaggaatagctgagattccttgggaggtgccactgctctccatctaagtcctaaggacagatggaactgtgtagatgttcctccttaggcaaagatgttggaagtcctgagtgggtatcctcaggccagtctttgtgaaagacctggacggctattcccaggcatgtgttatgtagtcctggacggctattcccaggcatgtgttatgaagacctggacggctattcccaggcagtgattataaagtcctggacggcaattcccaggccagtgtttcagagagtcctggagggctattcccaggcatgttatataggagacggctattcctcctactactagacactgatacaggagatggcaattcctcctactgtgatacattgatatgggagacggctattcctcctattactggacactgatacaggagatggctattcctcctgctctgagatattgatatgggagatggcaattcctcctattccgtggcattattacagatggctattcctcctattctgcggtgtttagccacgtgaatatgatatgctatgttagtacctctgtgagacatctgtgaggcaggctatgagagcctctcatagcctagatgagatactgatgccataaatatggccaggatctctatgagatggctgagagagccaggatgaggtggaatacctctgatgctttgagcatccggttacggacccagagagctgggatgtgtgaaagctaggacaatgtcctaggctttgtatgggtgagctaggatggtttccttagctctgtttatatcatgtttagtatgtgtttggtggtaaaccagggttagggagaatttccagaaccctgagtttactgagacgtttgtctcaccctgtgtggggtttgtggttttcaggtgcttcttcttgaggagaggagcgacctctgggcaaaaggccctcgtggatcagataggctggatggggaggctacagtagaagactagagcagagcttcaagagttgaagctggtgttagatctctgtgtagttgatgggtatatgtatacccatttcctgtacatattatgttgtataacccagctggggtcttgttttgagcatgtatatgtacagatgttgagaatgtatataagtgtgtctcctcctgattatctatgtgttttgtgttatgtcatctgcctatatggttgtttatgttttatctggatcagcatatggcttgttttatgttctttgttatgtggtttttatattccgtgcataatgtaatcaagataaacgattctatcgcttccgcaccgcgctttctaaacgcttatagcgtgttatgtatatcattgatgataacatgccggagacgtccggggtgttacaatcttcctcaaacggtacacttgcttcgagtgcggaatgacaggtcatattaaggtagacttccatattcccaaaagaagcaacaaagagatacgaagaataaggcttcattcaaaaagaagaagaaggcatatatcggttgggatgatgattaatcaacaacttcccacgacaatagtgaagaggatgaagcaaatttatttctaatggcaagcaatgaacctgaaagtgaggtaaccatttatgattcggaagctgatgataactatgatcagctactagaagcgttcaatgaaatgcatcaagaagcacaaaagtaggtcattgcaaataattttctaaaagttaaactgaggtggcatatggataaactagtggagattcaaaaagagttgttgaaagaaaaaaagtttagaaaaagaaaagaaaaaatcttcttgtaattgcactaacactactaatgtcacttctccttttgaaggatgtaaagtttagaagtagaggttgagtacttaataaaatctttatccaagttcactatggagaaagacaattcggaagcattaattgcacaacaaaaatgtgttatcaaaaaggttggtttgggttatacacataataagaagcataaagcttacaacttgggtacctaaatctgccttttaaatctgtttgtcggtgtgcctatagcagataaacaactatgatatcatgatagcggttgctcaaggcatatgtaaggagtcaagtcaaagctcatgtctctaaaagctaaggaaggaggatttctaacatatggtgacaacaaaaaaggaaggattttcataaagaatgtcttatatgttgaagggctgaaacataacttgttaagcataagccaactatatggtaagggtttttaaatcatttttaaccgagagtgttgcacaataattgaaccattttcatacaacattaagtttgttggtaaccgtattggcaatacctatatgattaatgcagaaagtgcatctcactccaacatggcttgtttaataagtaatgatgatctttcttggctttggcataggagaataactcatatccacatggatcaattgaataagctactctctaaggaattggttagaggtctttcaaagctcaaatttgagaaggatggattatgtaatgcatgccaaaaggaaaggcaaactagagtatctttcaaatctaaaaatgtagtttctacctctagagtgcttgaacttttacatttagatctttttggtccttctagaaccatgatcattggaggaattactatgctttggttattgtagataactacaatagatatacctggactctatccatatcttctaaaagtaacgcttttaaagttttcaaaaacttgccaagatttttcataatgaaaatgtttcaaaattaaaagtttgaaaaatgaccatggtggagaatttcaaaatgaggactttgagctattttgtgaacaaaatggaattaatcataccttttccgctccaagaacaccaaaacaaaataaggttgtggaaaggaaaaataggtcccttgaggaactagcaaggatcatgctcgaggagaataatctacctaattatttttggattggtgtcgttagcacaacttgctatgtactaaatagggtgatgattagacccattctgaaattaactccttatgaagtatataagggatgaaaaccaaatgtgtcacatctaaaattttttggtgttaagtattttattttgaataatggtaaggagatacttgggagatgaaggtctgttcttgggttattctacaaataacaaagcatgtcgagtctttaataaacatacactaagaatataagagtctatgcatgtagtttttgatgaatctaagccccaaaggttaggaaaagtacctctttatgatgatgtaggaagtcctaaataatcctctcctacaagcaaaaaggtagtgaacaataaccttcttgaaggatactcactacaacacaacagtcttcctaaggagtggaaaaaacctaaggatatttctattgacaacatcataggtgatattgcaaagtgagtttctacttgacactcactaaatttgttttgtgaattttgtgtctatgatagaaccttcaactgctgaagaggtttttgttgatgaacattgggtgatggctatgcatgatgaactttgtaacatcccaaaatttcagaactaccgttaaatattaaagcaagtcttaggcaaattgatagtctatatttgatttatttgggtgaaatggttaagcgaaaagaccatattaccctttccttaaactaggaatgacagaaatgcccttgaggtcaaaatgacgaaaatgcccctggatattttgaaaattaccaaaataccctttagcctagaaatggtcagatattttgggaattctgaaggaaattgaggaaaagacagtatactcctagataacaaattatcaacatggttggtggcagaaaaccataacctgtaatttctaagaattttggaagatattttgaaaagagctcgatatagactacctcaggcatcagaaaatcacaagaaaatgatagacacaatctatagcattttctcttaattacaagaggaatagattgctttaataagctagtttagtaattttaataattaaaggcaaagatggaccaattagaagtaagataaaagtgattttgtaggtaaagtctaactaacactctgaataattttagtggtatcgaggatggcttaaaaatatattattcttaggttggaaatataaattagattttactaaatactagaaataattttattcaatttcaagataatataataagcaaggaatgaagcaaaaacacaaaaatctttaaatgttggctattacatgtaaaagaaagaaaaattggtgaaacatttcctagaagcctagcattctacgtgcaaatgaagaatcaaggagaaggatgtagaacatggacacttggtgagaagaaaaacaaggattcttatcattggtccacttggaaagctaaacatcatagcttaggaagatattttgcacttcattaatactaaaccaaggaaggacccaaattgaaggttggctaaaggagaagctacgtgcaatttgaaaggaataataatgtagaagtttcaagacaaggccacttgtaaggagggaaaagactagccagtaaaaattaagcatatggaaagctaagttaagatatttgaaacaaaaatcaagaccaacaagcttttaaaaaggaggtggaaccgaaacatgggctggttggaggcaaggctacgtgcaaacattccactttcatcactttctaatatttcacttccatcattttctaaatagtccattttagttgcctttttgcttaacataaaaccaagcccactagccttaagaaaatcccacgtgaagaactataagcactaggaagaaggttgtccaaaagcttaaggaaagtaaggtatggggaagtttatgataagccaagtttgaatattaattacatgaggattcttacttgttttcataagaaattaagctttgcatgctaagtgtttgatgaaatgcctcaaagagttaaagattatgattattagaataagtgacttgattttagttaatgaatgatgttttgaatgaataacttgaatctaagcttaataggtgaatattaaattacttaggtttatatatatatcatgactatttttaaagaaaagtgattggaattaaagttatatgttttgatacaagtattttctaaatccttgaacttgcttatttatgctaagattatgttggaagcatgtttatcatattgaacgttataaagattaatggttaagtatagctttctttaaagtattttataaaataagctttgcttaccatgtgtttgacgaaatgcttcaaagagataaagatggtttaagtgttgttatgtggtaataaatggaattcatgtattgttgagtatttctatgagtttctgtgaaatgaatgagttgctaggggtttgtgaatctttatggatttcgtgtgttgctatgaactttaagtggttctatgattttcggtgtatgagaaatgagtaagttgtatgttatattgatgttgagaaagtgacgagaaatgatgtgatgagatgaatgagttgtcatgcataaatgaaaccatctcatgggtatcactgagagttgtatgtcagttggttactagaatgaaacacgtgcgttcagatgagagatgtctgagctagggggtgctcttgcagtatggaatcactaagcatgaaagtgttcgtgtaagtgagaacctagaaaacactgggggtaccctgactgatcggataaattctggtaggtcactgacatgggacttgatattacatgttgatgagtttcatagagttgtcatgtgtatatgcccggcgggggttaatccgtgatgttgacctcaaaaggaggtttgtcagatagctaaactgagtccatgcgttcataggagtctgagctagggggtagttgagacagtgaggaccacaccaccatgatgatcactgataactacgttgtcgacacgcaccaaaacaattttactaagctaattctgtagcacagagctaacctaggtcgactcagagacacgatcaatatggttctagcttcaaatcattggtaataataagggggtttttgtcaaacagttggtatgcgtaaagttaagcatgcaacaacacaaactaaaattaaagaacaatgcaaagattaacaagattatcaaggaataaagtaaaacagatgagaaagcatcaatccaattcactaaccgaagctatttgaatcatcatcattcccataaattgattctaacatgaacattcattcaatctcaataaaagtagttcaatcgatcctactcctaaattgattgaaacaaaccacaaccctaactgaactatcattcaattaatcttgtgattatcaattgaaattaggacatgaatccataatcctaactcactttcaaccctaagtgcattcataatcatgaaaacaaaatagaaattgaagaagaaggtgaacattcaagtagaattcgaaataccgaaccagaactccaattcttctcttgcttgagttaaatccttggattgattagtgatttagccttccatgatgatcaccaaggaaagccccatgaaatgagtgcagaaaaatggaagaatagcaaaatgaaaatgaagaagatgaagaacaatgaagaacaaatgagagaaaataaagaacaagagtttgatcctaaaaactaaagaaaagaaatgtaaaagttgtttattgaattgtaagtgtgctgtccaagttttcactaagtcactaatacatatagtgactaagttctgaaaataaaatgggccacaaacaagcccaacaatctaattatttgctatttacaaccatgaaagtcaaattcgcagcccaaaattacaagtgcagggacgttaacttcaaagctaaaaatgaccctctaaatgacagaattggcctcgggctatttgtagcaaacttgtagatcctttcgttatctttccagggactcctagaacgctccattcggagatcggtagctccctataggtcctgtacaagtcagatacatcaagtgagccaaaaatccgaaaatacgcaacaattagcaattaagcccacttacttacctaggccaaaaaatgaattagaataggaaaataaagttccaagagaggtcaaataagctaagaaggatagaaaaatactcaactaaaaaccctctatcaatcacataggtggaggtgacattcctacgcgccactgggctaccctgacttaatggataagttcgttccactaaggtgagggtggggctatctttactatggccatgtgatgagaatttgagagattcatgcatcatataaagaagatgagcatgcattacttgatgagtatgttgtatatctgtgtgttgtatagatggtatgatttgaattgtatgctgtgtagatggtgtgatttgaataaggtgtggatcatgcatgtctcttattttataagtgatattatgaccatgtttatatatattctttatatatgttttattcaaactgtggttgtcataaacttaccctatttttgtgtctgtggttgacacctgcgatgacctcaatttaattgggcaagcagggaaacagtgaagcataagctgtggatgatattgaagaaggtgtgatgaggaagcttgatggattgtattctgtgttttgtgtttattttgtggatgtgtaatttgtattaaactttagaccgtctgtatattaatttggacgtatatttggcattgtattatggactgtattattattcttttggacttcgaaacgaacatttggcaataaggaacttgttcacaatattgacggttaatacttaagcaagaagaaaagaattttccgcaaaatttctaacaaagggaattttaaaataaatggaaaagaatttttactataaataaataaaatacaagatagtaaaaagaggcgttacaatagtggtatcagagcatggtctgtttcctaggactgtgtttactatgtttctgtgtggttgctatgttttctatgtgttgtgtgataagagtttgttgtatttatttgaaagatgttctatgtgatatttgttatgatatggtgagttgctaggaaccatgaactgagtttcctgtaatctatttctggaatagagaagaagtagattaagcttcaatctacagttgagaaattttttggattaaattattggaaagaattatagttattatttaagtttgaaattcatgttatttgatggttatttcatgatgagaacatgttgattttaatcataagataggcgatgatctataagttgtaatattaatgatgtggaattatattgaatgttttttagaaagtggtttaggtggttttgatgatatttgggaggttttgtcatatttaatgaactattttgaatttataagttgaggatttttgcctttttgcttgtaaaggtttaaaggaattagaaattatttgaaagataaattgtggattattagattcctgtgttgcttgaggatattctatggtcaagatgataatgatttcacttgatcaataaggtatggtgatttaatttcacttgtggtacgaaggatgttaagataaaaatattttcctcaagatgattggtattttacttatggattttggagattggatgatggtgacataatatatttgtatttctgatgtttgttataccataagtttcaatgcatattcatgagttagcagactggccacctggataatttgtaaattgcaaagaaacattatggcaagaagccaaaaatacaaataagtaaatgataggtgaatttctaggtatcaactctttatggagattaagtgagtgtagggatgtatatgtttttcacttggtggatgtaaggaatagggattagcaagaatgattgtagtatagctgatgtatttcaagtttgaggctggagcataagttgggattaagaaaattttaagaggtcttttttggagaaatattttcttaaggatgttagaaataagaaagtgatagaattgagcttaagcaggggattatgattatgattgaggatatagctaattggtaaagtactaataattggtgaagtattctcctcattattaaggaaaatatggtattaggttacgtgtgctatttgactttagtatgacatatatttgtgagtaaggaaaattaaattttaggtatcttttatgaatgatgagctggtgaaaccccaactagtaagtatgttttgatttatgaagtgagccttgttttgtggaaatttctaatagaaaattgtatgttgatttggtctggttgccttttgccaaactgatgatattttgattgccttctgataaactgttttaagtaattagtgttaagatgagtaataatgagatatctatctctgttaactaaatttggttaagaaaatatttttaccctagacataggggtagagaccaaggtttctctaggtaacctatgtgttgctagaaaaatttccagaagaatgatatagtcggttcaccgtttgaaagaaagatagttttctatagaactgatatatggtgattgaaaccatatttgtagctacctatgaaaagtttcttatagagttagttgaagcaagtaggaaaattattaaataagtggtttgtgagatctaatatgttttcaggagaaatactagtgttaacggaagagtatagactatcattaattggataagtaatggttaaaaactaagtatcttttttccagaaaggatgaccttatggatcagttggtaggaacatatgtgtttgacaagatagaacttagggccagttaccaacaagatccatgtgaagtttgaggatattttaaggattgcttttagagccagtcatagtcattatgagtatttagttatgctctttatgccctggaatgtttagggattatacgaataagacctttcaccctatcttgatagtttgtgaaaatatttatagatgataccttggtatattccaaagattagagaaaagaatgaggaagacttgaggattttgttacggactcttaaggacagataactttatgctaaatgtaagtttggattgagattcttaggacatgtgatatttcaaggtagtatagttgtagacctttctaagaaaaaaagattgttctaaaaaggggaaaatcctaagtctatatttgaaattagaagttgtaggactaaacagaatattatgaaatcataaaaggtttgtttaagttagccttacctttgaccaagttgatttgtaaagaaagaatttttgaatggatgctcaaggtaagcataaaattctaattacaatacctgtattagtcttgcttaaattttagaaaaaccctttgaaatatattgtgatgtattcaaaaagggtttaaaaagagttttgacagaaaaatagtagtagatgcatctagacaattgaaagcccataagagaaaataccttactcatgagttagacttagccactgagatatttatgttaaaaaaaaatttggagaccttatctgtatagttcacattttgaggtttttagtgatcataatagtttgaggtaattgttcagtcaaatgaataaggtagtagagaaggatgaaatttttggatgatcatgactttgagcttagttatcattatgggaaagctactatggtggtggatgagttaagaagaaaattttgatgatatctgcattaatgattaggaaatggatctgttaaggcaatttgaggattgtagagcctaaggttaagaactctgtaggttttcaatgaattctttcaaggaaatagaaagtaggcaaagatctgatcctttcttaagaaccatattagagaatatatccaatagaaaggaatagtgatgttaagaaaggaacagatggtatattaaggttacaagaaggaatttgtgagcctaataaatctgaacctaagaaaataattttagaagaagggcccaagaataagttaagtatccatccaatagccactaaaaggtatcaagatctaaaagtttgtttctggtggtcaaggatgaagaaggagaataaatgagtatgtatacttttgtttaactttgccagaaatctaagatagaacactagaaatcttctggtatgttacaacctttggaaatatcccagtggaaatgggaaggcatatccatggattttgttaccactttacccaaaaatactagaagttttgattcggttaattaagtcggttcatttcattccattagtatcaggtatttttgggaaaaagttgataagttagtatataattaaggttgcaagatttcatgaagtctctagtattgtgtctgatgaagattctagactttggggaagcctacatagacctctaggaaccaagttggaactaagtttagtctaccattcaatgaacaaactggaaattgaaatgtcaacaattcatcctatacttcccgagtttaacaaatttcgaggacgaaattttttgaaggaggggagaattgtaacatcccaaaatttcagaactaccgttaaatattaaagcaagtcttaggaaaattgatagtctatatttgagttattttggtgaaatggttaagggaaaagaccatattaccctttccttaaactaggaatgacagaaatgcccttgaggtcaaaatgacgaaaatgcccctggatattttgaaaattaccaaaatacactttagcctagaaatggtcagatatttttgggaattctaaaggaacttgaggaaaagacaatatactcctagataacaaattatcaacatggttggtggcagaaaaccataaactgtaatttctaagaattttggaagatattttgaaaagagctcgatagagactacctcgggcatcagaaaaccaaaggaaaaggatagacacaatctatagcattttctcttaattataagagtaatagattgctttaataagcaagcttagtaattttaataattaaaggcaaagtggaccaattagaattaagataaaagtgattttgtaggtaaagtctaactaacactctgaataattttagtggaattgaggatggcttagaaatatattatttttaggttggagatataaattagattttactaaatactagaaataattttattcaatttcaagataatataataagcaaggaatgaagcaaaaacacaaaaatctttaaatgttggctactacatgtaaaagaaagaaaaattggtgaaacttttcctagaagcctagcattctacgtgcaaatgaagaatcaaggagaaggatgtagaatttggacacttggtgagaagaaaaacaaggattcttatcattggtccacttggaaagctaaacatcatagcttaggaagatattttgcacttcattaatactaaaccaaggaaggaccgaaattgaaggctggctaagggagaagccacgtgcaatttgaaaggaagaataatgtagaagtttcaagacatggccacttgtaaggaggaaaaagtctagccaataaaaattaagcatatggaaagctaagttaagatatttgtaacaaaaatcaaggctacgtgcaaacattccactttcatcactttctaatatttcacttccatcattttctaaatagtccattttagttgcctttttgcttaacataaaaccaagcccactagccttaagaaaatcccacgtgaagaactataagcactaggaggaaggctgtccaaaagcttaaggaaagcaaggtatggggaagtttatgataagccaagtttgaatattaattacatgaggattcttacttgttttcataagaaattaagctttgcatgctaagtgtttgatgaaatgcctcaaagagttaaagattatgattattagaataagtgacttgattttagttaatgaatgatgttttgaatgaataacttgtctaagcttaataggtgaatattaaattacttaggtttatatatatatcatgactatttttaaagaaaagtgattggaattaaagttatatgttttgatacaagtattttctaaatccttgaacttgcttatttatgctaagattatgttggaagcatgtttatcatattgaacgttataaagattaatggttaagtatagctttctttaaagtattttataaaacaagctttgcttaccatgtgtttgatgaaatgcttcaaagagataaagatggtttaagtgttgttatgtggtaataaatggagttcatgtgttgttgagtatttctatgagtttctgtgaaatgaatgagttgctagaggtttgtgaatctttatggatttcgtgtgttgctatgaactttaagtggttctatgattttcggtgtatgagaaatgagtgagttgtatgttatattgatgttgagaaagtgacgagaaatgatgtgatgagatgaatgagttgtgatgtgttgcaaacacatcttagttttaggctagttttaggttataatttagttaaataatttagaaaatagattagaattggttaagttttattattttgttattttaaatttaattcaatacaattgtgcatttcaggcttaaaaagaggaagttcaaggcaagaaaagaagaaaactgagttcaaggtctcacgcggattgcgccagattccgcgcgaatcgcgccaagtgaaaaataagcagcaccagattcgaataagccgcgcgaccagcacgggacctcgcgctagtagcgccagatgctagaaagccaacctgccaactcgaagacctcacgcgaaccgtgccatatccacgcgagtagcgccattcattcgaagccaccgcgcgagtcgcgtcagagccgcgccatcagcgccagaagaccaatctcaggccattcagcttgaagaacccacgcggttagcgtggaggatcacgcggtcagcgccaaccattcgagcaagccgcacggatagcgcggaactccacgcggatcgcgtggagaagatcctgtttcctgatttagatttatctgtttcggattttggcaatgttttaggctttgttaccttaattaaattattctataaatataaggcctctgaggactgaaggataatccattattcatctaaaaatcatattctatccttctaaacctctggaattcaagaatcaaggctagggtttcagcacagtcatgtattattcaacagctttgatgctcttgaggcctatggcaggctaaatcttgtattgtgggaaggccatgaactgatgagaactcctctgtaatttgactggtattgaataataatgttttgattgttttactctattctattcttattttatgttcttatttggaactgatcacttcaattaagtattgagggttaggattcgcaatggggacgttggggttctaatttctgacctgtttagagtaacaattgttcatcacctagggatagggatgcgtggctgcagaatttatgatatgatcttttaaatgcttaaactgatagatttcactgaggaattaggttttcaattcaggttaaagggttaattcactaagggattagggattaactaatctagaaagacttattttctgaacaatcataacaagaaacccttatgatatattctctaaatgcttagtttgacaggattgctagggaattaggattctcgatcgaattaatgggataagtcgctaataatttaggatttacgatattataagagatttatcgtttgggtaaataaaactaacaaaccagtcaagtgaaggaggtaggaatcaaaggggattgcgcctgaccacaattgtttctccattggtaacaactctatttagtttactgtttatttaatttctgtttttactcaacaaccaatcaatcaacaacttctttcaacattttctgttttaattttaatcacattgatttcttattattgtgaatttcaccccaatccctgtggagaacgatactcacttacctatcttattaattgaaacgatcggtgcacttgccgtggtgcgagcgtattatatcgttgacaagtttttggcaccgttgccggggattggcaaatggatttttacagtaatttgaatcttgtgattggaatttttgttactaatcgcttctctaagttttatgcgaggttcagttagttctgaggatttacagtttgacccagaaatagaaagagcaatccgaaggagactagctagacaaagaaggagagaagctgaaaactttgactttgattcacttcctgaattagagcctgaagcagagatggctaaagaacaacctaattagccaagacggagaccggaagatgaactaatggaggatattctggctcctatgttcacaagacccaactccagtattgtgaggccaccaatacaagctaatcatttcgatatcaaccctttattgatagcattggtggagcgcactcaatttggaggagaagactttgaagacccacatgacttcattgacagatttctcagaatctgtgatactatcagacaccaaggggtctcaaatgatgcagtgagattaagcttattcctttttgctgttaagggaaatgcattgagatggctgaaccgtcaaacatcaaatagcatctcaacttgggaggacttagtctcaaggttctttgcagaatacttttccatggataaatataaccgattggtgaatgaaatcaccaacattactcaaactggaagagaatccctatgtgctgcttggaatagattccaagaattgatcaggaggtgtccacaatatgatatgcctgtaggtaagcaggtacgtatattctttaatggtatgactcttgaaactcgtatgattgtgaatgtagcagcagggggtactataaggtctaaaacaacaactcaaacatatgagcttatcaattctttggcccggaatgaaaatgaaagtgtaacacaccagccaaagagagaaccaattcagctgtccactaacgatgctatgcttgcagagcagaaaattttggcacatcaactagccaaattgactgaaaagattgacaaattacaagtttctgcagcccaagtggcagctagccaaccacatgttatctgtgagtactgccaaggtgagcatgaatctaatgtttgccctattcttattggtgctgaccctgtgcaggtaaatggcatttggaatgatcaaaggtagcaacaaccataccagcagcagtcctatcagaggaataacaatttttctgctggaaacaactatcaaaggaaattccaaggaggtggcctagactacaagtctaacaactacttgcagccccctcctattcccaacaaggagccctctgaacttgaaaaggtagtgttgtagctgtaaaaaataacaacagaattatagctgaaacaagagctcatagaacaaaccaagacgctttcatcagaaatctggaaaactagattggtcaacttgcaaaacagttggctgagagaccacaaggtcagtttccaagtgatatagtgataaacccaagggaacatgccaaggccatcacaaccagaagtggtaaggtattgtctacaccagaaaacctgaggtgagtaaaaagggagctgagaagaaaaatgcagcagctgaaccatcaaaagaaaaagttgtagaaaacttagaagaacatctgaagtacgtcttcctaggtgagaatgaaacttatccagacatcattaacagagggctagaatggtttggggaagaaaaactgctcaaagtacttaaggagcacaagtcagccataggctggtcgatttcagacttgaaaggtataaatccctccttttgtactcataaaatattaatggaaagtgatgttaaacctgtaagacaaccacaaagaaggctcaatcccacaatgaaagaagtggtaagaaaagaagttgttaagcttttggatgcaggtatgatatatccaatttcagacacaccttgggtaagtccagtccaaactgttccaaagaagggaggcatggcggtcattcaaaatgacaacaatgacttgattccctcaagaactataacaggctggagaatgtgttgattaccgaaggcttaatgatgcaacccgaaaagaccattttccactccctttcatggaccaaatgcttgaacgcttggctggtcatgattattactgtttccttgacggatactctgggtataaccaaatcccagtagtaccggaggatcaagaaaagacagcctttacatgtccattttgagtgtttgctaataggagaatgacatttggattgtgtaatgcacctgcaaccttccagagatgcatgctttcaattttctctgacatggcagaaagagggcttgaggtatttatggatgatttttctgtttttcgcccttgttttaattcatgtttggctaacttagctaaagtcctaaaaagatgtcaagagacaaacttggttttaaactgggaaaaatgccatttcatggtaagggaaggtataatgctaggccacaaaaatatctgaaatgggaatagaggtagatagagctaaactgttattaattgagaaattgcctcctcctattaatgtaagtggtgttcgcagcttcttaggttatgcaggtttttaccgaagattcatcaaggatttctctaagatctcaaagccattaagccaattgctagagaaagaagctgagttcacatttgatgatgcttgtcttgaagcattcaacaccttgaagcacaaactcaccactgcacctgttttgattgctccagattggagtttgccttttgaattgatgtgtgatgctagtgattatgcagtaggtgcagttttaggacaacggaaagaaaaacggttgcatgttatatattatgcttgtaaaatcctaaatgaggcacaagtaaattatgccacaactgaaaaagagatgctagctgttgtttatgcccttgataagtttagatcatacttagtagggtcaaaagtaattatttatactgaccatgcagctcttaaatttctgttgcacaagcaagatgcaaaaccatgcttgttgcgttggatgttattgctgcaggaattcgatctagaaataagagacaaggcaggagttgaaaacaaggttgcagaccacttgtctaggattcaggagaaagacttgcaagatggaccagagacagaaatcaatgaatctttcccggatgagcaagtgcttgctgtgcaactcagcccatggtttgctagcatggccaactacaaagctgctggaattttacctggagagctcaattggcagcagagaaagaaatccttacatgatgtgagaaggtatttctgggataatccttacctatattttcaatgcactgacaatgttatccgcagatgtgtagctgaaagtgacgtgccggatattctgtggcattgtcattcctccaactatggaggccattttggagcaaaccggactgcacacaaagtgctgcaatgtggctactattggccaacattattcaaggattctaaaaactttgtgatgcagtgtgatagctgtcaaaggacaggaaatgtttctcgcagagatgagatgccattaaacaacatccaagacgttgagctatttgatgtatggggcattgatttcatggggccattccctaagtcattctccaaccaatacatcttggttgctgtagattatgtctccaagtgagttgaggcagctgctttacccaccaatgatgccaaggtggtggtctcattcctaagaaagaatatcttcaccagatttggggtgccaagagcaatcatcagtgatggaggaactcacttttgcaacaagcaatttgacagcttgttggccaagtatggagtcaagcacaaagtggaaaccccttatcaccctcaaataagtggccaagtagagatttccaaccgtgaattgaagcaaatacttgagaaaactgttggaacatcaagaaaggattggtctaaaaagctagatgatgctttgtgggcatacaggattgcatttaagactccaataggtatgtctccttttcagcttgtctatggtaaggcttgccatctccctattgaacttgaacacaaagcaatttgggcaactaagtttttaaattttgaactaacaaaagctaatgaaaagaggttgctccagttaaatgaattagatgagttcaggttagctgcatatgagaatgccaggatctacaaagagaagacaaagaagtggcatgacaaccaaattcgtccaacggagtttgttcctggccaacaagtgctgctctataattctcgcctgcgactctttctaggtaagttgaaatcacgttggtctggacctttgctcgtacgagaagtctatccctatggcacagtggcaatctcagctttggatagtgatcgagctttcaaggtaaatggttatcgtttgaaacattatttcgggggagaagtggacagaaattcaagttctgttccactcaaagccactaaagtttgaactgaagtaagcgtctagcttaagacgttaaacgagccactagtaatgtacatagtgctttaagtcttgtttagaattactagcagtagatttagcattctgcagtattttccttctgcatattccatagtagttacttaggttcatgcattggtaattaggaattcaaattatttcaaactttgatagcttaggtccatgtttatacatgtttccataatagttaagctaggtagcattttaattaagtcatataaaataaaaagctaaataaaaagcaaggaaagagctgaaaaagatgtggcgcgactcgcgcctggcgcggtgctaccagcgtcaaagcaacgatcatgccacgctaaccgcgtgagatctcgcgctgtccgtgcgagaagttcgaattggcagcctcatctgcataagttggcgcgaccggcatcaagtttggcgccaaccgtgccagagctacggttaagttacgccgttggcgtgacatccgtgccaaccgcacgagttgcacgaccctgaacctcaattctgcaataaatcacgctaatcgtgtgaatagtggcgcgactagagccattggttcgaatcaattgcccaattgtcaatgttccgcgctaaccgcgtggaatgccccacgaatcgcgccaggctttcgagccaaaaggtcctttcaatgccagatcacgcggatcgtgtgagactccacgcgaatcgcgcaggcaagacaaaacaaaagtccctccagtgcttcatggcgcaatccgcgccgctttacccgtgatccgtgcgaggtcgcggaatcagtttttattttaaaatattcccattcgcgcctcactcttctctgtctccaaattctctcctccattctcgccctctacccagcaacctcattaaccacccttcaccacattcctccccattatcacttcttaacagccacgcatctctctttctcaacttctctccacaccactacactcattgtggccattcctctcttgttcccaaattctctgcaaccaaaagtttcccattgcataatggctggtgacaaggtaaatttctgaactttagatgctttaacaagtcccaatggcaacttccattctgttctgataaattttgggaaaccttaggatagagacttaatcactttgttcattaataattcttttgtggaatgcaaatgtggtgatacttgatgaattactaatgtgtttgtgtggaaattctatcattttggatattgatgtgttcaaaataggtatagtgtgttaaattgattatatgcccaccaagtgtttgtccaaatgcctgaatgagaaaacagactaaattgtggtaaagtttagattgattatgggaatgtgcactaaatctttcaatattatgatgtgaataaggctcagatgctttggttttatttggaatatgcatgtatgaacttgttgtgcttataaggactatgctcataaaatggttgttgaaatgattatggtaatctttcctttaaacatgtctatttgcatttggattaccacaaatgaaaaccataatgcttgaccatcaaattctgttttgagcatacttgatatagaaatgaaaaggaacctgcctgcactaatctgaatgactaaatatgcaaattaaacttatcttgtacttgagaattgcaacaatgagccttcatgatgaacgtgtgatgcattttgtgtgagctagttggtgtttattttcttactgttggttacatgaaacgagttaggtgtgcaatgagacattttgaacaaagctgtgaatggataatgcccaaaatctgcgaatggctaaacatggcatgggtcttaattgaaaatgaaatgcattggaaccaaaacatgggcactggactgtgtatatatatatatatatgtttgatgattgaaggaacttgttaggctgtatccatgctgacactaagattaaatggtttcaactttagacacttgtattaggctaaatctgggaattgttttaactctgtgcttgactgaatatgcaagtaaccagaggcttgaagtgaacatgttgatctttgttatcatggcagaatcatactgtaaacaatttgattgaggaaaaccaagtttttacatctgtgttgactgtactatatacatgagtttgtgtttcaatgaatttcaatgggctaaatctgggaatccagatgaagctatttatttccttgtcagaaggtgcatattgtttcctaatcaactgataaattgaattagtgcttgcatgcaatgattgaatgttgttttgttgagtatagttctgagtaaatctgggaattgttgagtgatagagggtttttagttgaatatttttctatccttcttagcttatttgacctctctttgacctttattttcctattctaattcagttttgggcctaggcaagtaagtgggcttaattactaattgttgcgtattttcggatttttgctcacttgatgtatctgacttgtgcaggacctatagggtgctaccgatctccaaatggagagttctaggagtccctggaaagataacaaaaagatatacaagtttgatacaaatagcccgaggccaattctgtcatttagggggtcatttttagctttgaagttaacgcctctgcacttgtaattttgggctgcgaatttgactttcatggttgtaaatagcaaataattagattgttgggcttgtttgtggcccatttcgttttcagaactcagtcactacatattagtgactttagtgagactttagtaccactctttacattttttcaataaacaagttttatttttctttcctttagtttttagatcaaaacctttgctctcattttctctctactgttcttccttgttcttcattttcgtttttctgttcttccattttcgtgcactcaatccatggggctttcattgatgatgatcatggaaggctaaatcaccaatcaatccaaggaaccaaccaaggcacaaggagaatcgatgttctggtttagtatttcgaattctacttgaatgttcatcttcttcttcaattgctattctgtttttcatgattatgaatgcgtttaggattgaaagtggattaggttatggattcatgcctaattttgaatattaatcacagaattaattggatgatatttcaattagggttgtggtttcaattaaattaggggttaattcgattgaacaacttctaatgagattgaatggatgttcatgataggataaacttctgagaatgatgatgattcgaattgcttggtttagtgaattggattgatgcttctctaatctgttttactcacttgttgataattttgttaatttatgtgttgctctttaattttagtttacgtttttgcaagttttacttacgcatacaaactgtttgatcaaattccccccttactgttaccattgaattgaagctagaaccatattgattgtgtctctgagtcgacctaggttagctctgtgctacagaattagcttagtaaaattgttttggtgcatgtcgacaacgtgtttatcattgagttccatctaacgattgtaaataagcttattaacccaaatgttgattgaatgagcttgataatattacatttgctgctgaataaatgttggtgctaaacataaatgccaattgttctgtgactaaattgggtctaaatctgggaattgaatcaattgaattatgcatctatatctggttttgttctgagttacagggaaaacaagtagctaaggctaaaaagaagaccacaggggcaggaggcacaaaaagggcccgagtatcagattatgatgagaccagatttaggacaacagagtgccaaaagaagtttgatacttggtatctgcagaagaagattatatcagagaagaaaatcctttgggacacacttccggaggagaacccagtcagagaggtcatactcagatgttagtggcagcgccttgtcactcccagagcctagttccagcatgatcttgaaggagttttttggcaaatgttgatccagacaccgtagccaggagcaggatgtcttgggtctgaggtgtccaggtgtcttttgatgagaaacctatagagcagttattggacactcaatacgatccagttgagggttgtgaattccatgatttattcttccgcatgcagccagacgcattgaccaaaatgtatagggatgaagttcctcagctggccaccactatcagaagggctatcacaagtttatacactgtttggaagcctaaatccgggctggactatatcccagagaagatgtggaagcatgatttgattggggatgcagctttctggcatcagttcatgaatcacacagtgataccttccactaatatgactgatgtgaatgtagagagagcgatcctgctttacacgctcagaggtgatggtaaccttctcatctctaaccttctttctaacaggattcttcacatgatacaggacgctagcagcaaatcctggctggcacacccttcccttattttacatttatgccgccaggtggggatagaaattgcagatgacgaacccatggacgttccgatctcctcgcttatgagccacaagacttatttggacgccatggagtcagcggctaatgagcaagttctccgagcttcaaagctcaaacctgaggagttagcagcccgcagccccagagacttacctacaccagaagagccacatccagtccagccaccagcagatgcagtaccaccagctacagctccttcttctaccaccactcctggacatgagccgctctacacagattctcccacctatttggccttccaggagttcgttaggacccagcttgctcagcagaccaccatgctcggagccatatgcagacatcttggcattcctccatcagagtaccagattccaccaccaccagtagctccagccacagagactcctcttgctccttcagatgatacagctacagagccatccactaatgagcatacatccacagatgttgcaattattgtagagagaggagagggagcggagtgatcaggacatattttcagtttctgttttattttttttattgtttctggtttttatgttttgtttggtttatgattctgcattagacattgcattatgcacattttacagttctgcacatttatatatatatttggtaccttttatgatttataccttgcaaataaaaactgtttagatcaatgtttgacttgaatgcgattttccaaataatgctccaaattttccaaagcaccgtgaccttatttgtggttgctggggacagcaacttataaatctgggaatggtcgttactcattatttcgcaaatcacaatcaaagaacaagtgacgtctaacagaatttttcaaaaaaaatttcaaaaaaataagcagcacatcaaatttttcagaatcaaaagtgaatggacacagtgatggataggatttctttgataaaagcttgatgaaatgagaaatagcatgaattgcatgttgcatgaatggaatttgattgttggtatgagaaatgcatgttgaagttgaaatgatatctgaaatgcaatcagctgagattgacttgagttctaacacctgtaaggatttgagccaaacagcggtaatgttttctttccaagagactccaatttcattgtattctagaacttgaattgtttctctggatgcaggtatgacttgatatgattaaggcagatttttcttctaaaactagggccaaattgactcaccaatcaattattttccatttgcaccttatttgagcctaagcctttcatttcaaaatacctaaatcagagctttattcctttgaccaactccctgaggctagaaaaagtttgatataagtccatgacagcagaaaaaccagggaattgtacatcaaggtatgaaaggagcacaagtgaatccaattggttgtgaagaacaagaataaacaagcataagccaagttggaaaacaataagtccatcagctggaatttgagaagctgcagtaatctctgagtttgtttatgttttgattgtttaaaaaaaataaaataaaataaaataataaaattcaaaaagaagtgtattactttgttttactttagaataaatggttgaataaagtaccaggtgttgaaaagagaatgacaaagagcatggaagaccacaaggaatggacttaagggactggatctagcctcattaagctacttatccaaagaatttcctacccttagcccaaccacgttacaagccaaaaagaccttttgatcaagtcatacttgcaactgttgagaacattttcaagcttatggtagtgctgtgacattgttgagtaagagggtcatcataaccttatacacttgagtaaatgagtgaattaaacacaatttttgtgaggaatactcaagtaactctcatgaattgacagcattaaaagtgccttggaagctttgatgtgaatttgatcatatacaacatgatgattctaggattgtaacctgtggcttgtgtttgattattgattcttgcttagtcttgaattccttctgttgctggggacatcaactatcaaatctgggaattgtttgatgtgttgcaaacacatcttagttttaggctagttttaggttataatttagttaaataatttagaaaatagattagaattggttaagttttattattttgttattttaaatttaattcaatacaattgtgcatttcaggcttaaaaagaggaagttcaaggcaagaaaagaagaaaattgagttcaaggtctcgcgtggatcgcgcgaatcgcgccaagtgcaaaataagcagcaagagattcgaataagccgtgcgaccagtgcgggacctcgcgctagtagcgccagatgctagaaagccaacctgccaactcgaagacctcacgcgaaccgcgccatatccacgcgagtagcgccattcatttgaagccaccgcgcgagtcgtgtcagagccgcgccatcagcgccagaagaccaacctcaggccattcagctcaaagaacccacgcggttagcgtggaggatcacgcggtcagcgccaaccattcgagcaagctgcacggatagcgcggaacttcgcgcggatcgcgtggagaagatcctgtttcctgatttagatttatctgtttcggattttggcaatgttttaggctttgttaccttaattaaattattctataaatataaggcctctgaggactgaaggataatccattattcatctaaaaatcatattctatccttctaaacctctgaaattcaagaatcaaggctagggtttcagcacagtcatgtattattcaacagccttgatgctcttgaggcctatggcaagctaaatcttgtattgtgggaaggccataaactgatgagaactcctctgtgatttgactggtattgaataataatgttttgattgttttactctattctattcttattttctgttcttatttggaactgatcacttcaattaagtattgagggttaggattcgcaatggggacgttggggttctaatttctgacctgtttagagtaacagttgttcatcacctagggatagggatgcgtggctgcagaatttatgatatgatcttttaaatgcttaaactgatagatttcactgaggaattaggttttcaattcaggttaaagggttaattcactaagggattagggattaactaatctagaaagacttattttctgaacaatcataacaagaaacccttatgatatattctctaaatgcttagttagacaggattgctagggaattaggattctcgatcgaattaaagggataagtcgctaataatttaggatttacgatattagaagagatttatcgtttgggtaaataaaactaacaaaccagtcaagtgaaggaggtaggaatcaaaggggattgcgcctgactacaattgtttctccattggtaacaactctatttagtttactatttatttaatttctgtttttactcaacaaccaatcaatcaacaacttctttcaacattttctgttttactttcaatcacattgatttcttattactatgaatttcaccccaatccctgtggagaacgatactcacttacctatcttattacttgaaacaatcggtgcacttgccgtggtgtgagcgtattatatcgctgacaggttgtcatccataaatgaaaccatctcatgtgtatcactgagagttgtatgtcagttggttactagaatgaaacccatgagttcagatgagaaatgtctgagctaggggtgctcttgcagtacggaatcactaagcatgaaagtgttcgtgtaagtgagaacctagaaaacactggggtaccctgactgatcggataaattctggtaggtcactaacatgggacttgatattacatgttgatgagtttcatagagttgtcatgtgcatatgcccagtggggttaatccgtgatgttgacctcaaaaggaggtttgtcagatagctaaaatgagtccatgcgttcagaggagtctgagctagggggtagttgagacagtgaggaccacaccaccatgatgatcacataggtggaggtgacattcctacgcgccactgggctaccttgacttaatggataagttcgttccactaaggtgaggatggggctatcctgactatggccatgtgatgagaatttgagagattcatgcatcatataaagaagatgagcatgcattacttgctgcgtatgttgtatatctgtgtgttgtatagatggtatgatttgaactgtatgctgtgtagatggtgtgatttgaataaggtgtggatcatgcatgtctcttattttataaatgatattatgaccatgtttatatatattctttatatatgttttattcaaactgtggttgtcataaacttaccctatttttgtgtctgtggttgacacctgcgatgacctcaatttaattgggcaagcaggaaatagtgaagcataagctgtggatgatattgaagaaggtgtgatgaggaagcttgatggattgtattctgtgttttgtgtttattttgtgaatgtgtaatttgtattaaactttagaccgcctgtatattaatttggacgtatatttgggactgtattatggattgtattattattcttttggactttgaaacgaacatttggcaataaggaacttgttcacaatattgacggttaatactttaagcaagaagaaaagaattttccgcaaaatttctaactaagggaattttaaaataagtggaaaagaattgttgaagatcaactgggtcaacattattgttgatatcatgttgaagaagaaaagcattgagtctttcaaatgtccttatgtagttctgatatccaggattcttgactattttggtgttgatacccaagaagaactcttggttttgttgaggcagaatttgaagggaagaccaaagtcttgaagcggatgagatacatcaagtctgaagaaactgggcttggatggattgagaatattagagaagatcacacaaaacaagaaaaagccaaaaaggagcccatgagccactttgagcatatgatgttagcaaagatggatgaactcatgacgatacatagagaagactatgttgagcttaaggagtgctttgagtctatctcggaaaggctggatgctatgggagcacctcatgtagatgttatctgatccttagttaccctttaggaccttaatataattggcctcacagctcataagcatatagtccaggcttgatcttttgttctctgtttttttgtttttgcaatttgactgtttttttgttttttcattttaaccatgctactctatgttttttgatcaattgtaatctctttttaattaatgatatgatatctttcttttctttattttgtgtatcttgaactgttattctttatattctctctgatacacactctttttggctttgtgatgccaaaagggggagaaaatagtttgatgtttctttgagaaaaattgatgcttttgatggcttattgaaattaaacttcacttgaattaaaaagattctactaacatgtttgttaagcatgttgcaaaataggtactgtggaaggaaaacatcaatacacattatatgaatttggcattatcaaaactaaaaagggggaaattgtttgaacaaagcttgaagaacatgaagcccttagtttagttttggtttgataattgtacaatgcctaacacattttgatagatgaggcatttgtattgattgtttttagtataggcatgtgtgtgctttagtttttttaacaatctttttcatgccttgagttttatcagttatgaagtagatgaacattctctttctctaagtttcttaggaactcacttttccttgaaatttggctagtagtgttggatatagggggagcaacaagaagaatgaagcttatgatttagaagaaagttttgagctattcacatgccttaaagattgtaattcaaatgaagtgtatgagaggtcaatcttttgatctttgcattgcatgcacgtaatcatttatacgcttaaatgttttcattaaagtatcaaagctattcacattttaaaaaggaactaaatgagcaatgtttttggaaaaatgtaatcttactgctttaatcgattacatagcggtttaattgattatttgcttcgttttaaatctggaaaagatttgatgaacatattaatcgattacataactcttgcaatcgattacatagtgtaaaatgaaagttatgcattgctgctttaattgattacagttaatcgtaatcgattacataagctatttagaaaagcatgcttcactgctttaattgattaccataaattgtaatcgattacacaagttgcttcagaaataaaacttcactgatttaatcgattacaactcgggttaatcgattattttgttcattgtaaaacccagaatgaagccttgaacactttaatcgattaagtgataattaatagattacataagtcattttaatcgattatttggcatgtctaatcgattacagtctgttagaaaaagctattataaataggaagaaggtttgtcttggatcttaacttttcgaatgttctgaatacacacaagccttctcaaagtcagaaagtgattttctgggtaaactaagttcttgtcccactctttaatcttcatgggtattgaaaaaggtattttttctattgcttggaatgcaatagaaaaaggtttttttattcctataaaaactgttggtaatgatatgattcccaaagaatgggatgaaatgacagatgctgataagagagttgttcaatatgattttaaagctaagaatatgattacttatgcactttcctctgatgaatcctttagaactgttaggtgcacaagtgcaaaggagatgtgggaaatgctggagataactcatgaaagtgctgacgaagtaagaagatcaagaaagcatgtctaaatccatgagcatgagatgttcaagatgaactccacttaaagcatatctcagtttcaaaccagattcactcacatagtaaatcatcttcttggtcttggaaagatctttgatgctgaagaattgaacatcaaaatcttgaagtgtctcacaagactagagcaaccaaaggtgacaacaatcaaagaatcaaaagatctattcaaaatgtccatggcttcactttttggtaagctcttgagtatgaacttgaaatgtcacaactaaccaatcaagaagatgcagaaaagaaacaaaaaagcatagctttgaaagctgcatcctcaaagatggaaaagatggaatgttggatatagggggagcaacaagaagaatgaagcctatgcttagaagaatgttttgagctttcacatgccttgaagattgtaattcaaataaagtgtaggagaagccaatcttttgatccttgcattgcatgcaaaaaatcattaacatgcttaaatgtttcattaaaatatcaaagctactcacaatttgaaaaaggatttaattgagtaatgtttttggaaaaatgtaatttcactgttctaatcgattacatagcagattaattgattattcagttcattttaaaactggaaaagctttgatgaatactttaatcgattacacaactcttgtaatcgattacatgttgtaaaatggattttgtgcattgctgtgataatcgattaccattattcataatcgattacataggctatttgaataagcttgtttttatgctttaatcgattactggtattcataatcgattacacaagttgtttctaaaataaaacttttctgatttaatcgattacaactcagattaatcgattattttgttcatttttgaaacctataatgtgccttgaacactttaatcgattaagtgacaatttaatcgattcatgtgcgttttaatcgattatttggcacgtgtaatcgattacaggttgttacaaaattttgttataaatagaaggaaggcttggcttggtttgcaacttgaacacttcgcattttctgagtatacacaagccttctaagagttagaaagtgattttctgggtttactaacttcttgtcccactctttaatcttcatgggtattgaatgatttcatggacaagagatttcaaaagtttaatggagagcatgtttgaaaattctgtttttgcaattcaaccttgattggtaactcatatgcattcatattcataggatcatcaggttgtttctctccataatctttgattgtaatatcgtttttgcaatttctattatttgatgctattgtaaaagggttcttcaagcttgagctagagtagtgttctctaggaaggaacaaaatagtgttctctagttcttcttcattagaagtctaatagggttttagatttctattctttatctagtgttgataaagagggtttgttgtaaagcttgtaagaacaaaaatttataatagtggaactctaatctaatgttgattaaaagaaattggatgtagcttcttttaagaagtgaaccagtataacttgcttgtgttgtttttctttatctctatttctacaagtcatcttgttcatttgttcttggttgtattatcattacctaacaagttctgttttaagctattggtttcttgagctgagtaatttgattgattaaaaacattcttggtttaaaagtgattaagatcctttgacgctgatttcataaataatttttaaaagaccaagtttaaaccaattcaccccctcttggtcattatgggtattcctattattttcaattggtatcaagagccggttcttgagtgttattcaagatcactatctttctttaaaaagaaaatgagtaccacacaaattaccttcaaggaaggtgcctccctcaatcgtcatccgatgtttgaaggagagcacttcagtttttggaaaaatagaatgaaaatctttattcaatcaaatgacctaggtgcttggaatgctataaagaaaggtcttgtgattcctattaaaactgttggtaatgatatgattcccaaagaatgggatgaaatgacaaatgctaaaaagagagttgtccaatatgattttaaagctaagaatatgattacttctgcactttccagtgggtctggcgccaccagcgccagccctggtgccatcagcgccgcaccctccacagggttttcttctactgggtcccggcgccatcagcgcgggacctggcgccacccgtgccacaatgagcgttcttacaacttgtgttgtcaaatagcagaggtatttcttttaattctacaccaaaatcttgtaattgttgctttagccataagctttgagcacaacaacttccaactgagatgtattcagcttcaactgttgataatgcaacacaagattgtttcttgcaatgccatgagataaatgaactttctagtagatgacaagttccactagtgctttctctatccaacttgcatcctgcaaagtcagaatcagaataaccaacaatattaattgatgcacctttaggataccacagaccaacttttggtgttgacttgagatatttaaggattcttttgactgctgtaagtgtgattctttacgatttgcttgatatcttgcacacaagcacacacttagcataatgtctgatctactagctgtcaaatacaataaggatccaatcattcctctaaattttgactcttcaaccttctttcccttttcatttgaatcaagataggttgatattgccattggagttgtagcatctttgcttttatccatttcaaactttttgatcactttgaggcaatacttggattgatttagaaatcttccattcttcatttgctttacttgaagtccaagaaagaaagttaattctcccatcgttgacatctcaaattcattctgcatagagatagaaaattctttgcaaaacaattgattagttgaataaaaaattatatcaacatatacttgaaccaataagatatcattcttttgccttttgatgaacaaggttttatcaacatgtcctcttgtgaaagattgttcaatcaaaaatttacttaatctttcataccaagatcttggagcttgttttaaaccataaagagtctttttaggtttaaaaacattgtttggatgtttgaaatcagtaaaatcaggaggttgctttgcatatatatcttcctcaatattaccatttaagaaagcacttttaacatccatttgaaaaagtttaaaatccattaaacatgcatatgcaagcaataacctaatggcttccaatcttgcaactggagtataggtttcctcataatcaatgccttcttcttggttgtaaccttttgcaaccaatctagctttgtttctgaatatgattccactctcgtcaagtttgtttctaaaaacccatttagtggcaataggtttgagagaggaaggtctaggaacaagttcccaaacttcgtttctcttaaactgatttaattcattatgcatgacatgcatccaatgttcatcaattaaggcttgatcaatattcttaggttcaatttgagcaacaaaagccatatacaacagagatttcttaatgaagatctagtagatactccctttgatacttcactaattatattgtcaagtaagagatctcttgtagttctccaatcttttggctcttggactagtgttgatggttttgtttcagcacttggttcttctttctctttattcattgaatcattgagctgaataaattcctccaaaggacctgcatctacatcacactttttttcctccacggggggattagattcatcacaaatcacatgtacaaattcttccatgcacaaagttctttttttgaaaactctatacgctttactatgtaatgaatatccaaggaaaatggcttcatcagtttttacatcaaattttccaagtgattctttaccattatttaaaacaaaacacttgcagtcaaatgctctcaaatgagaaatgtttggttttctacctttgtatagttcataaggggttttctttaaaatatgccttattagcaatctattcaaagtgtagcaaactgtacttacagcatcagcccaaaaatgtttaggcaaatttgtctcattaagaagagtttttgcaccttcttcaagggatctatttttcctctccacaacaccattttgttgaggtgttcttggagttgaaaaattgtggtcaattccattttcttcacagaatttttcaaaatgttcattttggaattttccaccatgatcacttcttattgagataattttgcttcccttttcattttgagcaagtttggccagttttctaaaagcattgaaagcatcactcttggatttcaaaaacagagtccatgtgaatctagagtaatcatctacaatgacaaacccatagtaattacctcctaaactcataattctagaaggaccaaacaaatccatgtgaagtaattcaatgggtcttgaggtggaaacaatgtttttactttgaaaagaatttttagtttgtttccccttttgacaagcatcacataatttgtccttttcaaacttaagtttagataagccaatgactaaatcctttttaattagcttgttcatatgatgcatgttaatgtgacttttccttctatgccatagccaagattcatcaattttgcttattaggcaagaagtgttgtgaaagaatgcatgatctatggagagtaaatagatattaccttttcttttacctatgtgaatcacctcaccactttgtccatcacatatcttgcagcaattgtcattgaatgacactttgaaccctttatcacaaagttgacttctacttaggagattttgttttaacccttccacataaagaacatttctgattttggttttgaagctatctcttatgttgccttctccaatgatcttccctttgttgttatctccataggtgaaaaatcctccatctttaagattcaaatttgtgagcacttacatgtcaccagtcatatgtctagagcgtccactatcaagataccataatgaagatctagctcttagacatacctgcaaaattcaaatcaatttatagagaaaggtacccaattgagattgggcccatagggttagctactttcttcttcttttgcacccaaatacaatctccattaggcacatagaatctcctagcatagcatttatataatgtatgtcctttcatcatacaatagttgcatgttacagattttgatgaatttttgaagtaagcattttgattgatctttgagttattgaacttcttttgattcttttgttttggtggtacaaatacagttttgccaaaagattttgagtcttgtttgtaacccaaaccagaagtatctccagcatatttctgcacacttaacatttcagccaagttgcatttacctttgtaaaactttctcaaaagatcaattaaaataactattcttggataagagtaacatgtatttttctctttgacttcttttgtaatcatcaaaatccttttgcaacaaattttatttttcaacattagtagaagaagaacatacacatccattcattttgtaacttgaaacaagtttttcattttcttctttcaagttgcaaatttcagtttgcaattctgtaatttttgcaacatgtcatctaagatttcctttgagcttattattggattttgcaagcttttgggcctcttcatgcattttttaaagagcatcaataacttgatcaagttcataatttacctcagttccagcaattgagaaattatcatcatcttcattgattgtggaagtgagacacatatttgattcttcattttcagttaaggattcagaagttgttgactcattatcttcccaagctatgtaggctctcttagaatttccttccttcttcatcttattttcactttgttgctttttcaaaaagatagagcattcagatttcatgtggccaggctttccacattcaaagcaagtgaagttgttgtcacttcttttgttgttgttctttgtgaactttatgttcttgtttcttctcaagaacttgctgaactttttgacaatcaaattcatgttgtcctcttcaatcttctttacttgagttttcctcttttccaacctttgaggatgcagcttttaaggctatgcttttgtgtttcttctctgcatcttctgcattggttagttgtgacattcaagttcatactcaagaagcttaccaaatagtgcagccatagacattttggatagatcttttgattcattgattgttgtcacctttggctgccatggtcttgtgagacacttcaagattttgatgtttaactcttcagcatcaaagatctttccaagaccaaaaagatgattaactatatgagtgaatcttgtttgaagctgagaaatgctttcagtggtgttcatcttgaacatctcatactcatggatcaaggcatgttttcttgatctacttacttcatatgtaccttcatgagttatctccagtatttcccatatctcctttgcacttgtgcaccttactgttctaaagaattgacagaggaaagtgctgaagtaatcatatttttagctttaaaatcatattggacaacttttttttcaacatctatcatttcatcccattctttgggaatcatatcattaccaacaatttttataggaatcacaggacctttctctatagcattccaagcacctgggtcatttgattgaataaagattttcattctatttttccaaaaactgaattgctctccttcaaacatcagaggacaattgagggaggcaccttccttaaaggtaatttgtgtggtattcattttctttttagagaaagatagtgatcttgaataacactcaagagctgctctgataccaattgaaaaaaataggaatacccacaataaccaagaggggggtgaattggttgaaacttgatcttttaaaatttagatgtcaaatcagagttaaggatctttatcacttttaagtccaagaatgcttttactcaatcaaattactcagctcaagaaaccaatagctcaaaacaaaacttgttggataatgataatgaaaccaagaataaatgaacaagatgacttgtagaaatagagataaagaaaatcaacacaagcaatttatactggttcacttcacaacagaagctacatctagtttcttctaatcaacactagattagagttccactattataaatttttgttcttacaagctttacaacaacctctctttatcaatactagataaagaatagaaatctaaaaccctattagacttctaaggaacaagaaccagagaacactactctgttctttcctagagaacactactctagccaaagcttcaagaacccacttacaatagcatcaaataatagaaaatccaaaacaaaattacaatcaaagattatggagagaaacaacctgatgatccaatgaatgtgaatgcatatagattaccaatcaaggttgaatagctgaaaacaaaatttcagaacatgctctccattaaactcttgaaacatgttgtacaagaatcattcaatagctcatgatgattaaagagtgggacaagaagttagagaacccagaaaatcactttcaaagtcttagaaggcttgtgtatacttagaaaatacgaattgttcaagttagaaaacaagccaagccttccttctatttataacagaattttgtaacaacctataatcgattacacgcgccaaacaatcaattaaaacgcatatgtaatcgattaaattgtcacttaatcaattaaagtgttcaaggcacattctaggtttcaacaacgaacaaaataatcgattaaaccgagctgtaatcgattaaatcagaaaagttcagtttcacaaaatagcctgtgtaatcgattacaaatagtggtaatcgattaaagcaacaaagcaagctttttcaaatggcctatgtaatcgattacgaatgatggtaatcgattatcacaggaaggcacaaaatacattttacactatgtaatcgattataataagtgtgtaatcgattaaaacattcaccaaagctttctggtttcaaatacgagccaaataatcaattaatctgataggtaatcgattaaaatgttcatagaagcttttccattttgaaacatgaactgaataatcaattaaaatgctatgtaatcgattaaaaaacggtaaaattatatttttccaaaaacattactcaattaaatcctttttctaatagttagtagctttgatgttttaatgaaaatcatttaagcatgttaatgagtatgtgaatgcaatgcaaggatcaaaaggttgtcttctcctacactttatttgaattacaattttcaaggcatgtgaaaagctcaaaagaaccttctaaatcataggcttcattcttcatgttgctccccctatatccaacataaggaggaaaagaagtgtgatgtagatgcaagtcctttggaggagttcatccaactcaatgattcgatggataaagaaaaagaagaaccaaatgctgaagcaaaacaatcaacaccagtccaagagccaaaagattggagatctacaagagatctctcccttgacaatatcattagtgaagtctcaaagggagtatctaatagatcttcattaagaaatctctactgtaatatggcttttgtttcacaaatagaacctaagaatattgatcaagccttacttgatgaacattggatgcatgccatgcatgatgaattgaatcagtttaagagaaatgaagtttggaaacttgttcctagacattcttctctcaaacctattggcactaaatgggtttttagaaataaacttgatgagagtggaatcatagtcagaaacaaagctagattggttgtaaaaggttacaaccaagaagaaggcattgactatgaggaaacctatgcaccgattgcaagattggaagccattaggttattgcttgcatatgcatgtttaatagattttaaactttttcaaatggatgttagaagtgctttcttaaatggatatattgaggaggatatatatgtggagcaacctcctggttttgctgattcaaacatccaaaccatgtttttaaacttagaaaagctttgtatggtttaaaacaagctccaagatcttggtatgaaagattaagcaaaattctgcttgaacaatctttcacaagaggacatgttgataaaaccttgttcatcaaaaggcaaaacaatgatatcttattggttctagtatatgttgatgatataatttttggttcaactaatcaattgttgtgcaaagaattttctatctctatgcagaatgagtgtgaaatgtcaatgatgggagaattaacattctttcttggacttcaagtgaagaaaatgaagaatgagacatttctaatcaagccaagtattgccttgaagtgatcaaaaagtttgaaaaggagaaaaacaaagatgttgcaactccaatggtcacatcaacctatattgattcagatgaaaaaggaaagaaggttgatgagtcaaaatttagaggaatgattggatccttattgtatttgacagctagtagaccaaatatatgctgagtgtgtgcttatgtgcaagatataaaacaaatcctaaagaatcacaccccactgcagtcaaaagaatcctcaaatatttcaagtcaacaccaaaagttggtctttggtatcctaaaggtgcatcaattaatttagttggttattcttattttgactttgcaaggtgcaagttggatagaaaaagcactagtggaacttgtcatccgctaggaagttcattgatctcatggcattgcaagaaacaatcttgtgttgctttatcaacatctgaagctgaatacatctctgctggaagttgttgtgctcaaagcctatggctaaagcaacaattacaagattttggtgtagaactaaaagaaatacttttgctatgtgacaacacaagtgctatcaacatttccaagaatccaataatgcactcaaggaccaaacacattgagataaggcatcatttccttagagatcacatccaaaaaggtaatatcaaaattaacttcattgatactcacaatcaattgactgatatattcactaaacttttagctagagatagattatatactcttagaaacatgctaggtatcttggatgaatctaatctttactagcatgattgttatgtgcttatctatgtgaaatagcttctcacttaatccatcatcacatgtgccttcaaaattccaagttgtgctgcataaaacactgttcattctgatattttcactgtaataatcgattatagcatgaattaatcgattaaatgaacttgaaacatagcttaaaataaaatttgtgttcttctgtaatcagttacacaagcagaataatcgattattcttcatagaaaaaaatttcagaaaatgaatttctctgtaataatagattaagccacggattaatcgattacacagcataaaaatccttttacaaaatttaaattcactggaataatcgattacggtgaatggtaatcgattaaattgtttgagaaactgattcaaaaattcaaatctttctggaataatcgattatgatttgaattaatcgattacacaagcttcaaatatattttatatttcatatcatactataataatcgattacatatgggaaataatcgattacatttcatcttccttaactgattttcacttaaataatcgattacttgacgaattaatcaattacaacttctgcagaaactgattttgcttacgaattaatcgattacatgagcatataatcgattattcatggagttactgcaaaatctgcgatattttcttggaaaatgtaactgcccaactgccacctaatttagatttgagtcttctatgctttaatgttagttggttaatacgaattaattgtttctcatttcaaatttgaaccttggagcccaaaatcttctataaatacagcctttgttgaaggaagaaatcacaccatcctcatcttctttcttaagtacttttgtgttcttcttccctctaagtttagaaactctctccagatagtctctcatcatccattagccatgtccacatctaagagagtcaacgcttccaagagaaaggctggtgaaacctctaaccctgttgtcaataggttagaccattggtttcctgctgagagagacaaaatgacctatcttcaactcaatgccaccaaattagtttgtcctcccaaacaccttgaacttgaccggttcataagataaggttttcaattccctgcttttctcgaaacttagggattgagaaagtttgttgagatgaagggttccttttatcctgaattagtaaaagtgttctacacatgtgctaagggctctatggatgggacccttatgtcccaaggtaatggagtagccatggaaattactcctgaagtctgggaagcagttaatggaatttcctttgaaggtgaaagaaaatttgaagaagaggctgggggttataatagagtggaaacctataggtggatgctccttgatccccaaatgaggctgaagcttcagctaagcactaccctaatgacccatgaagacagatttcttcactacataatcacctacatcctaacccctagagccaccaatcatgcccaagccactgatgatgacctccaacttatgtatggcctcaagaattccattcagatgaattggattcttattctggaggaaattatgctaaaacccaagaggttaatgaattacccttttccatatgttgttcttgttttccaggtttattgattactttaatataaatgtctctaatgttgttgacagcacaaacttaagcaacaacctcatcaaagagaaacatctcaccaagcttgggatggttaaaacccctcaaggatggcaaatggctggccaacaaatccctgctgctggaaatgaagaagaaactgatgaagaggctgaagatgaaggccctgctcaaccatcttacagtccatttgaatcacttatgattcaaaagatggatggcttattgtccccacattgtgagcacagggctgaaactaattcagctttggaggagataaaatctaggctagaaaacatagaatctaagcttgtccttgatggttctgaatccttttaggattactatgttttctttctaattactttaagtttcttgcatttcctcttctcgtttttcatctgctttctttttttatgattaatgtattgttcctccctactgattaatgaagtctttattttctccttctcattatttgttgtgctatattttttgtctttgataagcctaatagggggagaaatatttattgatatcatactttgttttgcactctgttgtgctctgtttttttgctgtgttttgcacaaattaaaaattgatgaattatttaagtaagggggagcaaattgagcaaattaagtctaaggaagcaactaatgcaagttaatgattaatgtttatgcaagcatatatcttaacacttgttcttggcaaagaggctgatttgttttcaagtttacatagttcaaagtcttctattttcatccctcaaagtacttcaaaatcaaacacatggtcaatcaaatatttggcatgttcaaagccaaaaagggggagattgttggatatagggggagcaacaagaagaatgaagtctatgacttggaagaatgttttgagcttttcacatgccttgaagattgtaattcaaataaagtataagagaagccaatctattgatccttgcattgcatgcataaaatcattaacatgcttaaaagttttcattaaaatatcaaagctactcataatttgaaaaaggatttaattgagtaatgtttttaggaaaatgtaatttcactattttaatcgattacatagcaaattaatcgattattcagttcatgtttaaaactggaaaagctttgatgaacactttaatcgattacacaaatcttgtaatcgattacatagtgtaaaatggactttgtgcattgttgtgataatcgattatcattattcgtaatcgattacataggctatttgaataagcttgtttttctgctttaatcgattactgatattcataatcgattacacaagctgtttctgaaataaaacttttctgatttaatcgattacaactcggattaatcgattattttattcgtttttgaaacccagaatgtgccttgaacactttaatcgattaagtgacaacttaatcgattacatgtgcattttaatcgattatttggcacgtgtaatcgattacaagttgttacaaaattctgttataaatagaaggaaggcttggcttgatttgcaacttgtacacttcgaactttttgagtatacacaagccttctaagagttagaaagtgattttccaggtttactaacttcttgtcccactctttaatcttcatgggtattgaatgatttcttgggcaagagatttcaaaagtttaatggagagcatgttctaaaattatgtttctgcaattcaaccttgattggtaactcatatgcattcatattcataagatcatcaggttgtttctctccataatctttgattgtaatttcgtttttgcaatttctattatttgatgccattgtaaaagggttcttgaagcttgagctagagtgagtgttctctggttcttgttcattaaaagtctaatagggttttagatttctattctttatctagtgttgataaaaagggtttgttgtaaagcttgtaagaacagaaatttataatagtggaactctaatctaatgttgattaaaagaaactggatgagcttctcttgagaagtgaaccagtataaattgcttgtgttgtttttctttatctctatttatacaagtcatcttgttcatttgttctttgtgtcattatcattacctaacaaattctgttttgagttattggtttcttgagctgagtaatttgattgattaaaagcattcttggtttaaaagcgattaagatcctttgagtctgattttataaataaattttaaaagaccaagtttaaaccaattcaccccctcttggttattgtgggtattcctatagttttcatggaagactcaagtgaagaagatgaagagaacaacatgaatctaattgtcaaaaagttcagcaagttcttgagaagagataagaacagaaggttcacaaagaataacaacaatgtcacttgctttgaatgttgtaagtctggccacattaaatctgaatgctatatctttttgaaaaagcaacaaggtgaaaaaaagataaagaaataaggaaagcctaagagagcctacatagcttgggaaaacaatgagtcaacaacttctgaatcatcaactgaaaaagaagaagcaaatgtgtgtttcacttccacaataaatgaagatgatgaatcctcaagtgctgaaactgaggtaaattctaaatttgatcaagttgttgatgtttttcaagaaatgcatgaagaggctcaaaagcttacaaaatccaataattggctgaaaggaaatcttagatggcatgtcacaaaaattgcagagttgcaaactaagatttgcaacctgaaagaagaaaatgaaaaaaaattcaagttacaaaatgaatggatgtgtatgtgcttcttcttcatctaaagttgacaaatacaatgatttgcaaaaagagtttgatgagttcaaaaaaggtcaaggtgaaaaacatatggtagtactttcagaaaataattacttggttgatctcttgaaaaggctttataaaggaaaatgcaatttggctgaaatgctaagtgtgcaaaaatatgttggagatacttttggattgggttacaaacatggatcgaaaccttatgaaaaaattttgtgcatccaaaacataaatatcaaaaagttgttcaaaaaccaaggtttaatcacatgacttattttgaaagaacatcaaaaactgtaacttgtaactgttgtataaagaaaggtcacacatctaataaatgctatgctaggagattctttgtaccaaatggagaatgcatttgtgtaccaaagaaaaggaaaatagctaacccctatggacccaatctcaattaggtacattcctttataaattgacttgaattttgcaggtatgtctaagagcaagatctttattatggtatcttgataatggatgctctagacatatgaccgatgacatatcaatgctcacaaatttgactcttaaagatggtggatttgtcacatatggagacaacaacaaagggaagataattggagaaggaaatataggagacgattttaaaaccatgatcagaaatgttctttatatggaaggtttaaagcacaatctcctaagtataagccaactttgtgataaagggttcaaagtgtcatttaatgacagttgctacatgatatgtgatggacaaaatggtgaggtgattcatataggtaagagaaaaggtaatatctatttactcttcatagatcatgcattctttcacaacacttcttgcctaataggtaaaattgatgaatcttggctatggcatagaagggaaagttacattaacatgcatcatatgaacaagctgattaaaaaggatttagtcattggcttacccaaactcaagattgaaaaggacaaattatgtgatgcttgtcaaaaggggaaacaaacaaaaaattcttttcaaagtaaaaatgttgtttctacttcaagatcccttgaattacttcacatagatttgtttggtccttctagaactatgagtttaggagctaattatatgtgcttgtcattgttgatgattactctaggttcacatggactttgtttttgaaatccaagagtgatgctttcaatgcttttagaaaattggccaaacttgctcaaaattaaaagggaagcaaaatcatatcgataagaagtgatcgtggtggagaattccaaaatgaacattttgaaaaattctgtgaagaaaatggaattaactacaatttttcagctccaagaacaccccaacaaaatggtgttgtggaaaggaaaaatagatcccttgaagaaggtgcaagaactcttcttaatgagacaaatttgcctaaacatttttgggctgatgttgtaagtacagtttgctacactttgaatagattactaataaggcatattttaaagaaaactccttatgaactatacaaaggtaaaaaaccaaatatttctcatttaagagtatttcgctggaagtgttttgttttaaataatggtaaagaatcacttggaaaatttgatgctaaagctgatgaagccatcttccttggatattcattacatagcaaagcatatagagttttcaataaaagaaccttgtgcatggaagaatcagtacatgttatttgtgatgaatctaatccctccaaagaggaaaagaagtgtgaaattgatgcaggtcctttggaggagttcattcaacttaatgattcaatggataaagaaaaagaagaaccaattgttgaagctaaacaatcaacaccggtccaaaagccaaaagattggagaactacaagagatctctcccttgacaatatcattggtgaagtttcaaatggagtatctactagatcatcattgaataatatctattgtaatgtggcttttttcacaaatagaatgtaatacctagaatttttaaacatatgattaagcacgtgctaagcttaggattaagcttaggatggagaaaatataattaggccttggaatcccttggaaggaggcttaaaagcttgaggaagagttgaaataggctgttctggcctgtggcgcgacccgcgtgaagtgtggtgcgacccgcgccatacgtataaaacatgccaatgctgtctgccatcccgcgcgagtagcatgagatccacgccagtagcatgggaagtgccctagaaaaccctgttttcctctggagctccacgcgagtagcgtggatgttcacgccagtagcgtggattggcagtgttgtggcgcgagtagcgtggggaacgacgcgagtagcgcgggactttcgggcagcctatatatataaagctcatttggagaagaaagaaggaaaaagagagagaaaagagagagggaagccattgatgagtttgagagcttcatatcttctccatcgttcatctaaacacctccgacccaactgagaaagtgattagaaccccgagaagagagaaaacccccgattgattcttgagaatagctgagaaatagtgagattgatttctctgagagaacccttgagagctcggagtttaaagacgaaagaggccgtgattgagcaagttatcttagggaaagcgattccctagtggttctgaacatcacagaggtaagaaactcgagctctaaccgttggttctgtgttttggatttcggggttttggggtaatcttgaggggtgtttttggaggtgttaaagccgttattaggctcagactctgtagagtcttatgctcagaggactgttctgaggaagttagagccttgaatcatcattactgatgaagtttgattttggctctgagtcagtatgagcagagataaaaggttgactagttgactagtctggaccttagagcagttaacaaagttgctcatgagactatatagaggagactgactggttgaaactggtgattgtgagaggttggttttaagcagaaatatgcttaaccatagcttgatcagagttttagtagagactctgtagcctgatataggctgagagggatcctgtggagggtcagatgagcacttagaaagtgattgtgttgtggttatgaaaggatgagagtttcctttcatttgaacggtttaggaccgtatttgatgtgttatatctgtattcttatgtaggacgtgagcctgatagctcaggtggtgttgaccacgggaccgggagagccggtgacttttccagagcaggtaagctcttggttcttgcttgtaggtccttactgtgttccaccatactcctaagggggtaatggttctgttgagctgttatgcctgtgtttggcatttgtgtattgctctgactgattgatgattgatgtttgtaccctatgagagggtaatggctatgatttgatctgtaatgcttgccatttgatctggatctagaaagagatgataatcgtgcatagttattgattgtttagcttatgatatgcatgattgattgtagaatcctatagtaataggatagatgacatgtatttgaaatgagtttcatgatggaggtcggcccggtatataggagtcctcctaacatggttgtacctatatacttcggaggtgcctctaattgattttgataggtagtggtatccatcggaatcatatagatattgatagatggtgatatccatcggaatcatatcagtattgatagatggagataaccatcggagtcatatcaatgttgatagataagataactatcggaatcacatagatcagtgatagatggtgataactatcggaatcacatagatcagtgctagatggttataactatcggaatcacttgataatgacagatgggtgttctttgactgcatatctgctgattgaacgagtatagatgttgacctggatgagtttctttggttgtgtatctgttctcagtgaaccaggggaaggaaataccttcaagggccctgagtttactgagattttatatctcaccccttgtgtgagactatgttttgcaggtgattcttccagagtagcagagagatcccaaggcaaaaggcctatgcaggattagctgctgttgaacatcctaggctagaggacttgagcatgttgctcagatattttgtattttttgggttggttggttttgatgtaccctgatggtatatttgtacagttttatattgtataatggaactttgatgtatattcaccatattatgatgtacagtgttatgatagtgactttgatgatgtcacttctagtttatgcttccaaactgcttaaactctgattaattaggtgtgtctattgtgattgatttggtaatgaccctgattaatggattggggcgttacatagaacctaagaacattgatcaagccttaattgataaacattggatgcatgtcatgcatgatgaattgaatcaatttaagagaaatgaagtttgggaacttgttcctagaccttcttctctcaaacctattggcaataaatgggtatttagaaacaaacttgatgagagtggaatcatagtcagaaacaaagctagattggttgcaaaaggttacaaccaagaggaaggcattgactatgaggaaacctatgcaccagttgcaacattggaagccattaggttattacttgcatatgcaagtttaatggattttaaactttttcaaatggatgttaaaagtgctttcttaaatggatatgttgaggaagaaatctatgtggagcaacctcctggctttgtagacttcaaatatccaaactataacgcctcgatttatcatcttgtattttattgctttttagtgaaaattctttttcaacttatttataaatatcaattcaaaatttccgctactgagtaatattcaaaaatttcgaaatcatataataagagtacaaaaaaatttcttcattgagaaatacttgaaagtccgatgttcaataaaatacagactgttgttcattctttttacatagtacaaataactaaatactttgtacagaaattcatcttcatatcttcaatcaacagaaatcttcttcatgtatacagctaatactctctgttcatctgctcgctcgaataaaatcgaggtcatgacaggtgtcaaccacaaacacaaagtacagagtaagtttatgataaatataatttaagcaacaatatatatatatatatatatatatatatatatatatattcaatatgcaaataacaataatctcaagatgcatgattcttctttatcatgattcatgattctctgtttatatgatgcatgactctctttatcttttactatttggtaccagtagtcataatagccccatcccaatggcacggaattggatcgaccagtcagggtattgcagtgttgcaataggactctcacccacacttcatgtgatcatcatgggtggcgtgttctccccactgccaattaccccccagctcagactcctcttgtctgaacgctcgtctcaattctttcagctatctgacacacctcctcttgaggcacataacacggattaacccccatcaggcatatgcatatgagacatttaagactaattcactttaatgtataattctttatcatctcatatttattttaaacatcagtcttcaatttctatctcacatactttattcaaaaattcaatagaatttcagtatagaattcagcttgtatagaaaatttatggaaacacatgaaattcataaggattcatggaacactaagcaacacatgtatttcatagaaacactcaacaacacatgaacttcaaatatctatttgaacataacacactcaaactatctttatttctttaaaacaattcatcaaacacatggtgtgcaagctttattttccatagaaataaataagattctataaatacttattcaaacaaaagcaatacttaaactatatttagcataaacctccctatacataccttataatcatttatgaagcttgtctttctcttcctataaagctttgacaaacttcctcctaaaggcttcctagcttccacgtgattcttcactatggtgtggttctttccttaattgatttagacttgaaaaatgaagcgatgagggtgttgagagggagagagttcacgtgaaagtgtagagaggaaagcttggagaatgacttgcatttaggtccccccccctcccccctttatatagcatttggaaaatgatttaatattcatggacatatttgccctttctaactaatgaccttcatttagtttcattctaaccaaattacctcttgttccattgaattgtaactaagttaatgatgactttttacttttatgagaaaaatcttcttaagcttaacatacaccatacaagtgtcatgccacttgtttccatcatgtgacttgctttccaagtggcttatcatgaagattctactcccttctacaccttcattcatgtggtttacaagcttaaggagaaggaagacaagtgtcccacttagttggcatgtcttggaacttctccactttttatcacagaaccttttttagtaaaatactaattctggattcattaatcgttggatctccttaaaattttaaaggtacggtactatcccacatttgtaacttttgaccgtagggattgttaaaataatgtctagagctgtccacgtgttctaccaaaggagacaagagaagatttttcttcccaccttgtatacatgtcccaagtgtccaccacttgtctctttcatgaagcttgcctttacaagtggcttattcatgaattttattgcccattctacatccttcttcacatgtacttcaagcttaaggggaagaaagacaagtttttcttccttttatgccattaaatgtcatttattatgctttaagaaaaatctaatttcaattagagtatgtttggatggagaattttaattggggaaagtaatttattaagggatttaaaattcttcaatttaaaatttcctgtttggatatttttatatgaggaatttaaatttttggaattttaaaagagaattttaaacaactaaaaatgtggaattttaatttttctctaaaaggtgagaaattgaaattctcttcttttttagaagctctaaatgcacaactttttgctctgtctcaatcatcgacatactccgacctccgctgctctcaagacaccatccatcttaagtatttttctgtgaatgaggttcaaaattttaaaaatgaagaaattcaatttctttatccaaacacaaaattttgaaaataaaagaattttaattgatgcattttaatctgcctgaattttaaatttcttaaaattctaaaatactccatccaaacatactcttatggtttttcacatggtaattccttgtaggaagtcaattttaatttgaattctttcacctaaagataatatgaaataatagaactctagatatctccaaaaattatctttagtttcattacaaataactcataaccaatctctacagagtactatacagacctcaaacacaagattgttcttatctgaattccaattggtctatttttcttctgaccattaaaattactaaaccattttattagataaatctaaacatcctacaattgagagaaaattccacagattctatttctcatttttccatatttttctgatgcccgaatccttctgaatacaatttcaaagttgtcatttctaacctcaaggggcattttcgtaattttaaactcaagggcatttctgtcatttctaatttacgaaaaggacaatatggtcatttttccccaaacatttttgtaatgcctctaattaacatttcacccaataatttgaacatagaccattaattctcccataacctaagacttgcattaataaatatttgactatagttttgaaattttggggcgttatacaaaccatgttttcaaacttaagaaagctctttatggtttaaaacaagctccaaggtcttggaatgagagattaagcaaatttttgcttgaacaatctttcacaagaagacatgttgataaaaccttgttcatcaaaaggcaaagcaatgatatcttattagttcaagtatatgttgatgatataattttttgttcaactaatcaaatgctatgcaaagaattttctctctctatgcagagtgagtttgaaatgtcaatgatgggggaattaacattctttcttggacttcaagtgaagcaaatgaagaatgggaaatttctaagtcaaaccaagtattgccttgaagtgatcaaaaagtttgaaatggataaaagcaaagatgttgcaaccccaatggcaacatcaacttatcttgattcaaatgaaaaaggaaagaaagttgatgagtcaagatttagaggaatgattggatctttactgtatttgacagctagtaaaccggatattatgttgcgtgtgtgtttgtgtgcaagatatcaagcaaatcccaaagaatcacacctcactgcagtcaaaaggatcctcaaatatcttaaatcaacaccaaaagttggtctttggtatcctaatggtgcaccacttaatttagtaggatattctgattctaactttgcagggtacaaattggatagaaaaagcacaagtggaacttgtcacctagtaggcagctcactaatatcttggcattgcaagaagcaatcttctgttgcttttcaacaattgaagctgagtacatctctgctggaagttgttgtgctcaaaacctttggttaaaacaacaattgcaagattttggtgtagaattaaaagaaatacctctgctatgtgacaacacaagtgccatcaacatttccaataatccaataatgcactcaaggaccaaacacattgagataagacatcatttccttagagatcacatccaaaaaggtaacatcaaaattgacttcattgattctcacaatcaattggctaatatattcactaaacctttggttagagatagattctatactcttagaactatgctaggtatccttgataagcctaacatttgctagcatgcttgctttgtgcttatctattggaaatagcttctcacttgattaatcatcacatgtgcttacaaaatttgaaattgtgttgcataaatgttgtttattctgatattgttattggaataatcgattaaagcacgtattaatcgattaaatgaacttgaaacattgttaagaatgaaatttgtacttatgaaatcaattacacaaccaagataatcgattattcttcataggaaataatccctgaaaatgaatttctctggaataatcgattaagccgtcggattaatcgattactcagcctaaaaattcttttacaaaaattcaattcactggaataatcaattacagtgaatggtaatcgattaaattgattgaaaaattgtttgaaactcgaatgctctctgtaataatcacttgtcgaaactgcaaaaattgattttgcttacgaattaatcgattacacaagcatataatcgattattcatggcgttactgcaaaatctgcaagattttcttggaatttgtaattgcccaactatcacctaattcaaatttgaatcttctgtgctttaaagttagtgggttaatttgaaataattgttactcatttcaaatttgaactttggagcctaaaatcttctataaatacaacctatgttaaaggaagcaatcacaccattatcatcttcaatcttaagcactattgtgtttttcattctttcctctgagtctagaaactttgtctagtagcctttcctcccacattcactatgtctgcacctaagagatccaaatcctctaagagaaagagtgttgaaacctctaaccctgctgttaataggttagaccattggtttcctgctgagagagataaaatgatctaccttcagtttaatgccaccaaactcatttgtcctcccgaacaccttgactggtttagtagagaaggttttcaattcactgctaagattgaaacccaaggattgaaaaggttagttgagatgaagggtaccttttaccctgaattggtgaaggtgttctacacctgtgctaaggcttctatggatgggacactcttgtcccaagttaatggagtagccatggaaattactcctgtagtctgggaagctgttgctggtatttcctttgaaggtgaaaggaaatttgaagaagaggctggaggttataatagggtggaaacctatagagggatgcttcttgaccctcaaatgaggctgaagcttaggctaagcactgacccaatgactgatgaagatagacttcttcattacataatcacctatatcttgaccccaagatctactaatcatgcccaagccactgatgatgacatacaacttgtgtatggcatgaagaattccattcagataaattggattctcattcttgaggatattatgcttaaatccaaaagattgatgaattatccttttccatatgctattctagtttccaaatttattgattattcaatatagaggtctctaatgaggttgttgacaacacaaactctagtaatagcctcatcaaagagaaacatcttaccaagcttgggatggtcaagatcccttatggatggcaaatggctggccaacaaatccctgctactggaaatgaagaagaagctgatgaagaggcagaagatgaaggcactgctcaacaatcttatagtccatttgaatctcttatgattcaaaagatggatgctttattgtcactacatcatgaacacagggctgagactaattcatctttggaagagatgaaatctaggctagaaaacatagaagttaggcttgtccttgatgattttgataaactagcttaggtttcttgtatttcctgttactgctttactctgttttttttttcttctgattaatgtattgtctttccctttccattatgaaatttaaatttctcgttctcattatttgttgtgctatctttttgtctttgataagccaaatagggggagaaaatttgattgatatccaaagagcaaactctgttttgttctctgttttgctttattttctgttgtttcttacaaattaaaaattggcaaagttatctaagtcagggggagcaaactaagtcaaggggagcaaactaatgaaagtaaatgatcaatgtttatgcaagcatatttcttaacacctgttcttggcaaagaggctgatttgttttcaggttaataaagttcaagacttctattttatttcatccctcaaagtacttcaaaaatcaaacacatggtcaatcaatatttggcatgttcaaagccaaaaaaggggagattgttggatatagggggagcaacaagaagaatgaaacttatgatttagaagaaagttttgagcttgtcacatgccttgaacattgtaacaaaaagatgttataaataggaagaaggtttgtcttggatcataacttgaatactttgaattttctgaatacacacaagccttctcaaagttagaaagtgatttttttggttaactaagttcttatcccactctttaatcttcatgggtattgaatgatttcttgggcaagaggtttcaaagaagttttggagagcatgttctgaaattctttttctgcaattcaactctgattggtaactctcatgcattcatattcattggatcatcacgttgtttctctccattatctttggttgtaaatttcgtttttgtaatatttgttatttgatgctattgtaaagggttctttgaagcttatgctagagtagggttctctagggaagaatagagtagtgctctctggttcttattcactaaaagtctaatagggttttagatttctattctttatctagggttgataaagagagtttgtcataaagcttgtaagaactgaaatttataatagtggaactctaacctagagttgattaaaagaaactggatgtagcttcttttgagaagtgaaccagtataaattcttgggttgtttttctatttctttatctctattagttatcttattcatttgttcttggtattattatcattactcaacagattttgttttgagctattgatttcttgagctgagtgatttgattgattaaaagcattattggtttaaaagtgattaagatcctttgactctgattttataaataaatttttaaatactaagtttaaaccaattcaccccccctcttggttattgtgggtattcctattgttttcaagtagcatcgaattaatcgattacctcgctaagtaatgaactacacaaataagttttagaagaaggaatgttttatagcttaggataatcaattaccacatttgataatcaattacccagatcctagaaacaagataagctatctgtctgaatctataatcgattatcagacatcatgatcaattgtcgagtcaacacataaggaactgatattctcatattgaaacgaattaatcgattatcctttttgataatcgattaaccaatttctggaattgaagaacaaaagggattttgacaaattaatcaattagatctattttaactgtcaaattttataagtacctttatgtatttcctttttaagaggactcttgattcgttcaaaatttgtgaaaaacaatttcaagagagtcttaaagaagaataacactacaatatgtttaaagacggaagttgatcaaagaatcactcattttacaatcatgtattgatcaacttgggaagaaatattgaagatcaaagagttacacatttcagatgtattcggtccttatctttttatagtattgttcttggttagagttaccaaggatgttaaagaattgataggtttcaactctagatcttttcttatagggttcaagagaaagatctattttctattagagaattgtgtctgcatagtatttgtactagtgttctctatatagtagatgttctaagaggacttagaacaaactggatgtaggttcggattggactgaaccaatatagacttttgtgtgattctattattccttatagatttgtgttttgtaatcatcttgagagtggaattgatttcaaagggtcatcataaaggtttctattttctaaaaatcatttgagtaaactttgattgatttaattttgctagaaaaatgtatggtttattttgcaagacaaatgtttagtttattttggtggataaatgaattgtttgttttgcaagaaaagtgtatggtttatttggtcctgagtattggtatgaatttagtctaagtctttcatgttcagtatttcaattaggtgacacaaaaaatgaattatttgaggcagctatgggctatttaagatggttcatattggtattttaagtttataaaaaaggttcaaattagtcctttaactttttaaaatgattcaaattcatcctaaaactttttaaaatagttcaaattgggccttaggaaatctagttgcatgcgaagaactcctaacatcatagaataattactccttcaacaatgggcaaattcaacaacattgtacattttcattgtctacttgtccctcaatagacaaatttaagaacatcaaaatcagaactataataatccctaacattacacaacaaacaaaatcatcatcttcaaccatttcctaaagaacagagtcaggcaccctaatttttcaaaccatttatactaaaaataccaatggtaacatcccaaaacatgtccaatggttagttttcactagattaaaaaaaataggataaaaaaatgcatatcagacaccaacgtgtacatttaaagtctcctttcacgacagacacgacacagggatggtaaggaccaaactaactcgttttatttatctaattacttctcttaatttcgagtggtttgacataaaatacgcctccatcggacatttttatgaaaaattatgactgttcaaagttatatgcatcatcaattttacagtataattttgttcaatttttgaaattagttttgcgaccacaatgttttcattttttaatttgttaaaccgaaatcgtttaaaaatctacagtataattttggtcaatagatataccaagaaaacattacccacgaaaccaccaccaccctctccacctctggtgcgccgtcacgcagaaagcaaattaggcccaaataacaataacctagtttctcttctccttctcttcgcaatgctggtgcaccgtttattctttctccattgttgttcagctattttctccttctcttctcactgcaggctcccggtcctcaaccactgcctccgcctttgctcacacgacgatcgacggctagattcaagggtgggcacttgcccccctcctcttcaatgtgggtccgcctctgtgcatgcatgatggtttatggatttgagaagaagggttcatgggagtggtggtagtagggttgaactacggtggaaatcgacatatggacttaccggatatttattacttgacaaatcagtgtgcctgctgacctgccgaccatgtaacaatcatgtattgtgtaacgacctaaatatttacttatttttatttttacttaaggataaatttctaagaaacgtataatagtaaaatttttaaaatgtaaaatttgcaaaagatttgttactcatatacatagccaatgtctctgatacaaaatttagataatactagcacactactttctcaaaagtccagcttagtacataacttcttttatacatcttcactactccaaggcctcatggaatctgtccatcattgccatctaaaaaaaacatgaaacaaatcttgtgagaaataaatttctcagtaggcaaagctaaatcctgaccttattagtaggttagtaaaatcattcaaataatcaaacacatccacacgaaatatgcaactatatgaaatgcatgagatgaactatcccaagacaaatggcctccacatatcatactgtatgtggccacacttagtgtggacgctgctatagtcttacacaaacatgcatgaattttgccatatattcttgcccatgggtactacatatagtattgtatgtagtatcagattttgttttcccaaaagcctcgtactggacttggaacatggaaacatgaatccacctatcttaatcacatcaacatccataaaaattaaatccataagcaaaatacatatcatagcatcatatatatatatatatatatatatatatcataagtatggttacaccaccataccttatccaataagcttataagtatggttaaaccaacagattttattcaagcaaaatcattgccaacttaggcatgaccaaagaatatcctcacagaaaattatgttagtaatctaactaataacccgtagtatgtctttcaaataatttctaatcccttgaaattatcataataaaagattaaagcctagtaagcatcttttattcttccttcgcctattaccttactaattaatcctcaaaatcaaataattaagtatttaaaccatgcaactccacaccattcatcctctacttcaaaaattaaatcaaaacatgtccataaaaatatacacagacggtccaaagtatcattgaaatcacctcaaaagatcatcaaatggacttccatacttcactaatattgatgggtatgaatcatagcctatcttataacttaaatcaacatattctcatcaaggaataacctttaaacattacgaaattcaagcctaaatatcaaccataaatcaacctactaaaacatgtaaattaacctaaaccattgattaactagagatttaaacttcacctacctcaagtgagtttgagtcttgatatccttctaagcttgttaaatccttcctaagcttgtttgcctctacatgtgatttcttcaaggtagttggcttatgttttgcttttattcttcttgaaaatgaaaggtgaaaaggatgaaaggaaggatgaaaaggaaagtatgcaagaaagagaggttttttgtacgtgtactaagtttagaaaggaacttgaaattttcagttcctacaccctctatttatagtgttgatgaattgtttaacaagcctttgcaatgaaaatatcccttaggtcattatgaccttgctttacaaatggtccaatcatatgagttcttattttttaaccatacaagtgtcccttttcttgatttttctcaacacttcttcattcttcttgatgtgcaagtggagtatcttggcttgtagagcaattttcaccaattttcgtggattggctagatttttggaagattttgtgcttttcttcattcttgattttacccgaaaacccgttttagtaaaaaatattgattcttaattcataatcgttggatcttcttaaaattttaaaggtacactactatcccacatatgtaacttttgaccgttgggattgttgaaataatgtctagagatgtccacgagcaagatggaagagtgtagagaaatgttggcttgatttttttatgttaccctgcattcatgccatacaagtgtcatgccacttgttttcctcctatggcttgtctttccaagtggccattcaagaagcttcttcctctttctccatgcttctccacgggaatgaccatcctaaagggaaggaatgccaatttttcttcctttcatgctacatgtggtcattttataaaaatctagtttcaatatggcatattcttaaaaagaaatccaatttaatttgaattcttttatctaaggataattgggaataatagatctctagatgttcctaagaatttatctcaatgatagtttaaattaatcacaagtagtgtatacagagcaatacataaactttacataccgaattgctctttatcttaattttgattggtatatacttcttttgaccaccaaaattactaaactattttattaaataggtctattcatcctataattaagagaaaattctatagattttatgtaccattttttcatatttttcttatgcttgagttttcttgaatacagcctcaaagttgtcatcttctaaaatttgtagaaattttattctagagttttctgtcacaaaatatgttgatacttaggcagctaagtgtattctataatttcatcaagtttctacaaaatttctaaagttatttgagcattttttgcctagggacattttggtaattatgtcattcaacctagaggggcattttttgtaattttcatcttaagggttttctagtaatttctacttcatggaaagagtgatatagttatttttctttaaacatacttgtatccaattatcatcacatttttataattttggggatgttacatattgcaacaacctaagactaagaaaatgttcatgaagatggttctagtgcacatcatggttattttgtgtatttgttgaaggttaaattagcatgatttggttcttgctttttttggatcacatggttttacaacatataatctacttggttagggaagttgggtagactactttgttccttatgtttttactacaacaaatgtcatagggattgtgtggttcattttgttattttggaactacaatgaaggttggttaacatgtttagatatgttaactatgttacttatggttagatatgtatatataatgactttattagaataagttaattttttttgcccttatataaaaatgatggtttcattaatgttttaaaggatactaatttctatctacaagctcaaaaaaaaatatttctttgcatctaactttctagaagttaaaaaagcactttgcgaaaagtcaaattatatgttgaatattattatctcaatatttgaattagtaaaattattaattattattgtttgaacttttaattatttaaaataagatgaaataaatatattaaaattatttcattatttcatatatatttttcatatattattttatgcacattaaaataataaaatatgtacttcatttaataattatactagtagcttgcctagagcttctcttctcaatttcgagcgtgtgaataccggttttgcctcaatcagacatctcattcgaaagttatggtcttcctaagttttcattcacaccgcgcctcttatgcatgtctgcaagtgtggcatattacaacactccccatgcataggtgtttgagagccccatttgtgtaaataaatttcaaacagcaccttattggtaaataattaggagaaaaataccatttaggttcttctgtcgctttgtgtttctctcttttgaagtttccttgcatactcaaattgttttcccttcttctatgtggtttttcttaaccccaattttgtaaaaagttttcatttttaatcttgaacacaattgggttgctaaattttgttcttgggatgtaaagatctcagaaatgggaactttcttgaatttcaactctgtttctttattctctttcgttgcgaatttatttctgtttatgtacttgatattctttttgataatttgagttgttctttcccctcgatgttattctatgaagttcttgattctttctcaattgcaggcttatcattgattttttcttgtgaatttcaggataagcatccttatctgttattttttctcggctgctcaaattcattttcttagttgctagtggaataagcattttcaactatggcacttcatggaaccaccttatccttcaatttgagttgaccatttacttttaatccaaaatttctcttatttaatattttgtgggattgagaagtctcttgcttaggttattggaaaattactatacacaagcatttgtgttgatctacaatatactggattcgaattctaggattgaatctggattcacttaaactacttgaaaaagaattttggaaactaaaaaagacttcctcaatggcggtgtgtctgctttcattgatttccaactctgttagaagctggtatgttatattaatatatgcttataatttccattgcttggttgcaaataagatacccttgaatttagttgaagaaaatcgactttatggattgttgagtgaggataaagttatacttttcctctcaatgcttgtgtatatatatttttttatttgtttagtagatattctcccatgcaagacagtaaattgattttaactttttaatgaagggactttcttctacttccaagaagtttaatatcttgcctcattcgttcgccggtagcttttggaagctacctcatgtttgtctgtcttcctttactccaaacagattagttttgggcaaaagttttggaagaggagaccaactgtgtcttttgcctagtcaatttcccaagttgcaaatgggaagattaagtaagtatctatacttaaaaccttaaaaaatttcacattggtatttgcattttggataatattaatagtataagccgacaatgttttttttttctcatttagattttgcttgagtccaattctttttgcatatatgccccaattttgcagtacttattattttgctaaattttgtgttttgttgtctaaaaatgcctttgatctttatcaggactaggagtaaaaagtgaagattctgagagcatattgagtagcgacaacattgcattggatgagcagactctggaagatgggctacataatgccatagctgaagagaattatgctaaagcagcagaaataaggaccagtgaccttgcagccatctatgtagcaccgacaccgacacgcgacacttgacaagaaacgactcgactcttcaacacatcaatctcaaaaaattatgaatttcgacacgttgagacacgttttaatattaaataatatttttaatttatatagcaagtatttcatttttaatatttaataatttaaaaaattaaaataaactaataatatttatcaatgtaatctctcccaatactcaagtgtacctctatgttattgtgcatgcattccatgctcagttgctcattcattcaaattaaactaataaactaaactaaactgtgcatgcatttcgtgcctgtgcatgcattccgtgctcaattgctcattcatccaaattaaactaataaactaaactgtgcatgcatgcattctgtgctaaactgtgcatgcattccatgctcaattgttcattcatccaaattaaactaataaactaaattgtgcatgcattccgtgctccattattccttcatccaaattaaactaataaattaaacctcaccctctttatccacctcgtctctctcaattactttataattatatatacaccttgttctactccttcatctgaagaacaaaaattaaaccatccctctttacccacaccctttctctcaatcaatcactctcactctatcacggagagagaaaaactattccactttcagttttcgcacacaccatctcttattgttccttcttcttcttcttttctttttttttttcctttatcttaatggaacgatggaacacaacatcatcgcccagcctctgtcttctgccgctcccataccatttatctctactccatgtgcgacgggaggttccacgtctcattgacgtgacaagagagcgtgtggctatacgaggcgtgcgagcgcaccctgacggccttcttcttcaaggccaacaccgcctccctttgcgcctttgaccgtgtccgacacggttaaattcgcgtgtcgaaaccgatcaatgtgtcggagttgttgaccgtgtctgacacggtgtcggaacgtgtcggagtgtcgggctcgatacggcccctgtttcggagtgtcgatgcttcctaggcagccatgcaagacaacggtatctggagcaaacagccggttttacaagtcattcaagaccagtgaccttgcagccatgcaagccctgtgggcaaaaagggatgaggtatgttgtgtccaccctggtttgagaggaatatctggttatgatgacgttatcgggagctggaatttcgtatgggctaactatgaattcccgctagaaattaagctagaagacattaaggttcatgctagaggggatatggggtatgtcacttgcatgaaatttgtaaagacgaaagggggcagatggggaggtcaacttgtaacgaatgtgtttgagaaaattaatggacaatggtttatttgtattcatcatgcttccccagtatacttgtgaattcatcaaactttgcaatatagatagataggaagttcactctttagctcatccttgatccttctcacttcctatgtttgtatccatttttgttaagtttggagcccaatcttcactcatctccaaagattctttgagttttaaaattacaacttgactgtacaacaaataatctgtcatctccaaagattgttggagttttaaaattacgacttgactatacaaaaatctttagcataattctcttcagctatggcattaagtagctcctcttccaaagtctgctcatccaatgcaatgttgttgctactcaatatgctctcagaatcttcacttcttactcccagtcctgataaagatcagagacatttttagacaacgaaacacaaaatttagcaaaataataagtactgcaaaattggggcatagatgcaaaaagaattggactcaagcaaaatttaaatgagaaaaaaaaaaacactgtcggcttatactcttaatattatccgaaatgcaaataccaatgtgaattttaaggttttaagtatagatacttactgaatcttcccatttgcaacttcggaaattgactaggcaaaagacacaattggtctcctcttccaaaacttttcccaaaactaatctgtttggagtaaaggaaggcagacaaacatgatgtagcttccgaaagctatcggcgaacgaatgagacaagatattaaactccttggaagtagaagaaagtcccttcattaaaaagttaaaatcaatttactgtcttgcatgggagaatatctgctaaacaaataaaaatatatatatacagaagcattgagaggaaaagtataactttatcctcactcctcagcaatccataaagtcgattttcttcagctaaattcaaggttatcttatttgcaaccaagcaatggaaattatatatattaatataatataccagcttctaacagagttggaaatcaatgaaagcaacacgccgccattagtcttttttattttccaaaattctttttctagtagttaaagtgaattcagattcaatcctagaattctaatccagtatatcgtagatcaacacaaatgcttgtgtatagtaattttccaaagatgctactatgctatagtggtccgggactcaatgatgcatttccaattcctaacaatttacttaacttgtaaatggttccatttgggtaaactacctaattaagcatttaccgaattagtatttatcatgtaagtacttattttgtataagttgtttttataattgaagtgaatatcaagttatactgttttcatagaaactttaagctattttcgtatgttattcgggagaatttgttaaaataagctgaaaaccgcttatggacatattctggagaattataagttatttttataagctcttgtaattacaagtgtttacatcatacgaaaatctttaagtaaattataaataagctcttctaaaccatagaaaacaccattaatcagtgctatcaagatgtgctgatcatattcagaagctgggaagaaaccatctcttctaaataggaaatattttaatgaataaactaaacagggccttttgccaattaatttcaagtaaaaatattcggtttcgtacataaacttattcaattccaaatattaactcgtggtttataaaaataaataaacatatgcagttgaatctggtaaatagatgtgacaaatccaatagcagatcttgttaaaaatatacaaaaataacatcaacatcatcttgaattcaagttaattaagatcgatgaactcaataataaatacaaagaagtaaaaaagataaggtaaaaaaaagaaggataaagaaggggaaaaagaaagaggaaaatcactaaaaagggatcgtctgaaacataaggataataatggatctaaccctcaatcaagcttatgatctttctctatttcgtcctaaggcacaccttttgccaatctatatttcactcaattaagtcttgattaatttaccttttcttaggtaaatttcagtctacctttacctctcttgcttattgtgaatcctttagactccaaagtgtttctccacaattcaagtttcctattaacatcatctttggtctcatcaataagcacaatatcatctgcaaacagcatacacaacgacacttcctcttgaatatcttttgatagttcattcatcactaagataaagagataaggactaagagagtcgaaccttggtgtacacctaccgtgataggaaaatcccttaatgttccattacaagctttcacacatgtggtaaccacatcatacatatccttaattgcattaatatactttaatgatattttttttcttctcaagagttcaccataaaacttttcttgaaactctataaaaaatatgttttcttaagatctatagacaccatatgtaaataaaaataaataaaaaaatcaatgaatatagtgagtacagattagctgagttgagcattttggcttagtataaatcgaccaaaaataaaatgtttacaatgaatgactaattttagatatttaagctgagagtaaacgttatcaactcattctcaatgactaatttgtgagttcacattttttggtattgatagtcaagactcgaacttgagactagtaactaagctggaacatatacttgatcatccccacgtcaataatgttcagtgagttggcaagaggatttctgattttatagttgcagtttcctttttaacgagttcaactagtgcagaggatatccctgctggtattgttcattgaggtttcgttttgtacaaagatggtgttgctgcagcgatttctattgtacaatgattacgataatacaatgaccatcccagtttctgcaatgaaatttttgtttattttctatactggattgcatgtatgaaaggaaaacagaagaaaataaagagaaactaaaatgttactcctaaacttgattttctacactttcattttatacatcaccttttacagtaaaaagaggaagggaaaatcacattttcctttttccccctccatccccctttatcaaatagaaggtaggtgtaaaatagaagtgtaaaaatcaagtgcaagagtaacattcatgacacaattacattgaactgcattaacttgctatttcttagctacttgaagatcttaaaagctaatagtaataataactatgaagtatgaacaacaaaaaagtaaatctcttgtaaatttaaactctgccaactggggatagtggaggtattggagcatattttaaaggtactttccccagaagttttctgttgttcatggaactgggttccttaaggtgaagcacctcttcatacatgttacccatttccaaggaacctggtagtttctggcagcttaaagtcgcaactgaaatgaaaaatgcctgtaaatgagtgattgttgaatcgaattcaaccgagtagaaaccatccttcagtggtaacaaagtgaaaagtggtgtgtctttctcagttccttcctgaaagcaatgataaggataatactatgtaaatgagaagtccacaatatttataatgtagaagcacccccttatgtagaactataaaactgtaccttaacaaaaagttgaaaacgatcaatataagttttatagctctttgaaatacttgaattctggttctggttggagagcacaagcagcctgcaacctatgtcccaacccccgcaatcacatgatcccccggttttccatcgatagatcaaaggtgtaggttcacctttgtttggtgaaccatgtacaccacctggaagtataactgtagtgcaatcagaagcttcattttctcctgaactgcacaaacatctttcatctgtcaagcactttgagcatcctttcttcagcatgttattatcatcatgcagtccttcagtggtcttttcgcatgaggtctcaacaacaacagctgccagctctgcgctctggatgaacttcggtggtccttgatctgtctggccgatttcagcacccaccagaacatattctttaaccatacactttctactggagttctgattggttggtttggcgattttagagctagaaaacttcatctgagcaataacattgtaggcatagccacagcttttttctttgtttccatgtgttatccatccaccactctttttcttaatttcattaaccaggtagaatgtaaaacagctgcctaaatcacccttctcaagtgatgctaaactattcctggtagcagcaaaaatctttctttcattgttgagcacaaatttaaacaagggcactccattttttattgtaagctgcaagaggccttgaactgatgatccttggctcttttcagccagcagtgattcattgacaccgatagtcctgaagcttgaatttgcacttactccctctagtgtttgactgctttgagctgaattgtgtttatctgatgccttgtgcttcaataaagggtctaacaacctccgcaaggggctggaccggtttctgatatgactattaaccttctctttgcttggattatcccaacaaacagaagattgaggcgtcaccggaccagactttgcactaacatacacggaactatattgtggcagcgtaggcgcctctttgaaactgaaacttcttccaattcgacttaagctgaagctaaaccgacggttatgggatggattcatttccttctgagctgtcagctcagcagtttcctggtccagtgattccttcatcatactgaaggcatactgatctctcagcttagagtctaacatatccttttcaaagcaagcacttgcaggttgcagactagacatcttatgcattatggaagatggtgtcttagacacaacagaagaatggtctatacccagatcagtactaatgctgtgttgcattgtttccaaagaagaaaactcaactgcagaacacagtggccctgatggtgggttttcggaacatccatctgcagtgtaaatctcatcaggaagggaaacatatgacaaactacttttggttgattctgaaaaattttcaaacgaggatgttcttgattcagaaagctgaaaatcctctgaagaacttgactggggaatttctccgggacaaagaagcacaatattactttgcttgctatggcaatgtttctgaccaccgttaaaatccaattcttgcagctgatccacctttttcctggtttcactacagctggaactcattttcttagaactggatgaagcccctttgccttttgattttactgatggatgtcccatatcagagctggacttatgatttctctcttttttcttgcgtttatgctcttgcaaatcctccatgttctgcttagctccatcatccctaccattttcattaggaagatatgagatcccatggagttttgtgtttgatgcaaaatttttggcatgtgaggttcttttactatagccattcctcctctccttttcaagtgatatatctgagtgggttttgttgccaaaggactcaaacgcccagggtgtcaagctcttctcatctccaatgctcttagttacacttttggaagattcaaatcgtttgacatcataaaaaggaagtttggcactttcaggaagggattccctataagatgacctgatgatgcctgaagaaggcaaacttttcttatcactaagtttttccttgcccccaacactggtagatggtttggtagctgttcttgacaacaattcgctgctattgagtgatgtgaaactactagctagtactgggatatgcttctgcttgtgcttccatttctcaagccgagaccagtcaagaacgccaacattaaaagctttctcttgaaagttttctactttatcggtgcacaggagatagcctggcaaattagacatgtgcttgacaagttcatctctttctgttgcccttctccgcacagtttcggagttctgaatcttcccttctgcatccagcttgcctttctgtttgagatcactctttggcttcaacttatcagcatcctttggacttcgtttcgaatggggtaataccgaactttctttccctgtctttgaactgctatgttgttttgtgctgctctttctgaactccaaaccaaatcccatgtcctcagcaggcttcaaaaatccattacttggatgtatattgattggcatggcacaatatatatactcttaaacttcacacttcactcagatgcttcttcacccatatgctaattgccgcaaaatagtttctcttcactctgacaattatctgtcagtaaatgttcacaattgcatcagtttaacaaagtgtttgaaaaataaggtacaaatgattgtaaatcaacgtctcaaacacaaaaactttgcattatctaatatcaagaagtaaatagcccaacagaaataaaataatgataataaaaatgggcctcagacagtgtgaaagttatgagacaaggtttgtgaaaagaagggttcacgccatgccatgacacaattaacaatcaaacgatctacaaaggaaacaaacggatcaaattaaagcggatacctttttttcatggcaccaaacacaaatagcaacattgatcaagaaaagaatggaacaagattttgacattgttcagaaggaattatggaagaaaaaccacgtgaaagggaaacaattgaatgcatcgaataaatgaaaatgcacatagacttgttcaaacccatcaactttctaattcaatgaacaaagtgatgatgtatacctactcctcagttccaaaacagagacaagagtgactaaattccatttaccataaaaaaaaggtatataattttttccaaatttggtgctaactacacataatcccatatcgtgcaacccgaaacagagacacaagacaaatacaaagaaccatatccacaccattcatttaacataaaatgacatatccgacactgtgacagtgatatctacaaagtcgttaataacgaaaacgatggatttctaatttctaatagacccaacccaaaaaccgaaaaaagaacgaaaagaattaattaaaaatatcagaaaataaatacaaagctattaagctctgtttggctgctgagagaagaaaaaaattgtaacaagaacaaaaactgcacgataccctcttcgtagaaaatcaagagcaacaaaacccacattccaaaaaggaaaaaaaatgaaaaacaacgatcaaactcgcttctctttaagaaaaaaaaaaacacgaattttttctccattttcatcacgcttacctattaaaaaaacagagagtcagacccagaagaaaaaaaaaagatgcaaaatgtagaatcaaaattcaacaacgcagtccaaaaaaattctcaggaaacaagaacacgaaatcttacccagaaaaaaaaaaaaaaaaggaaatagaaaaacggaaagaaacgtgggtgtggctgcaatgatcgagagaaagatccaaagcgtaatgggaaaacgaaaagggacgtagtttagaagcgaagtaaagaattacaaagaggccactgttgtttctttcatcatttcgttctttcttcctcgttcatcttcgtatatgtttttcttttctctcctttctttccttcttttctttttcggtttcgtattaacgtgccgcgtttttctttcgctgataaaagagaaaaggaacaatcatcgattacgttactacagggaaaagaaaaagagggcaaaaaaaatcttagttttaatgcactatttagttactagtagtaactgttgatgtaatagtatgatttataaggcagttactataaaaataaataacatatatgtttgagaatataaaccttactttcttatgagaaaatagtttataataatataaaaggtttttatatgattattcaataaaaattataatgtaggataaatttattaaattttataaaaaagattacttacatatcatatgataatttctatttaaatgataatgtaaaagtttttatattgttgatatatggaaaaaaaaattatattattatttacgataaatgtttgtaacaaatttttaataaatgctcttaaattcaaattttttttattaaatttgaaaaaaaatgaactatacttcatatttaatgagttctatatatgatttttataatttatcacaaaattttaactaataatatataatatactgttagaaacagtaggttaaaaactagaatgtgttgttagtattaatcatataaaataaaaaaattatttttataattattaataatatatcaatgatttttattagtggctaatataaaatttttaatgtcttgataaatttctcattataacatttaacaaactcaataatatataataatttaattgattgagtatgattggtgagttattataaattttttgttatttctaattttatttctatttgtaaaaaaaattaacaaactcaataatataaaaagaatatctaattaaaggataaagtaaaacttttattttatatttaagtggggaaaaaataaaaggaaaacgaacaggctttaattaaatgggtgggagtgtgtctgcgagtgaagtgagtgagtgaggcagcgagagcgtttcgttttcaatggaaacggtggaaagaaggaaagaaggaacgggtgggacccacaatggaagacttgtttcgctgtcacgaatcccgaagttcgggaacgtggggccctcttacgtgttgctatatctgaattctgagcgcgtttagccttttatttattttaatttcagttcagtggttttgtcttttttattttaattttagtttaattcagtggttttgtctttttctataattttagtttaattcagtggttttgtctttttctataaagaaagagtaaatgggaacgaaaaaaccaaacgaatttcgcgggaacgccgatccggagatatcgttgcgccaagaatagtgaaagtcgcatcgcacgccacaaaaaacccaatatcccaacttcaacgtgctaatcaacgtctggcatgtggttttagaatgtgttagggggaaactgaaactagggattgcaaaatggatctaactcgacggattagttcattcaacccactaaaaaaggtgggttgggttaaaagtgtcaatccactatataaaacaggtcaaatcaacatagtttacaaaaatacgagccaaaaacggaccaacatgacggaacaagagaaatattaatttcattttttgtgattttgtgtccagcacagtagctccttccaggaccttccttcatttcagttctctacttctctctcacgtgtccctcccgtcgtccgtcgggatcttccttcacttggacaccgtggtccttacagcactgacgctggcgtccgcactcgcactacagtcttcacccgcaccgttgccggcgtctccactcttagtccccgcatcgcctctggcgtctccacctgccgtccatcccaaaagcaccgccagtccgccacggctccaccacatcaaccaccaggtacgctttgggctttctcacaatcattgaacaaaatattttaagagctttgtgtatacatactctgccatcgaaaatatttctcaataaatttacttgtctgaaattttgattagagaaaagctaaaagaaacacacttctttcatgaattcattctcttctcctaaccttcattcttctttaacctcttgcatatgttgtgtacatgctttttttctttcttcatcttcactgttttccccatttaacactagttacacaaccatctctaaatcatccaacagaacccttttttataaaccttttatactccttcatgtatcaatttagagctttcaaaagtgagcctaaagtcacagccactagctagaaacaaataggagaaattaaggtcttgtagtttgtttattgttttcagaaacaaattttgttttctattttttttgtctcctgaaagtgattgtccttgatcacatttatgtttttaaaaaactttgtcttgtgaataattgaaagtacttgaagaaaacagaagaaaagaaaactgaaaacaggtctgatgttttattgactaaaaaacttctctaaaaagatatctaaattaatataaatatttgaaaggtaaaaacatagaaggttggatttttggagataattaaggatgtggacatgtgaaaaacttctctcttgagttttcataacttggtttatgttgttattagggagtgaaaaatacaatgcttagttcatgagatattttagagttctagtgatttttgcattcctattatatatctttgaaagagtttcaagcatgaagttgttttcattttgtggttctgctgctatttgctacatgctgctagtgctgggcagaataacattactgatcttgttgaaggtatcattttctccttttttttttggaattccctgattgttttgcttctagtaggcatgtattttaattttatattaaaaaccattgttataataaattaagtttttggccagttggttcatgataggatattaatgattgtaggcaaggatttatcattaatttttaacataaagtaattacattttttaaataatttttttggcttttattttaaaaaataatttttttgattttttggtgggctggtccgctagcctactaatccacttcaaagtagggtggactagcatttctagcccagtttcttggtgggttgtataataaccatggctaaaaaaaaaaaaagttactgtagcagttactgtagcttggcgctccgagcgtgggatctggctctccgagcgtggcactgtagcagaagactatttttcacgatttttggtgccatcagcgccaaagtggcgccaggagcgccagatacacttgattttggcgccgtcagctccaaagtggcgccaagagcgccacagatgctggaaactggcgccaggagcgccaaagtggcgccaagggcgccagatgcactggattttggcgccaggagtgcggcatgtcggtcaggccacctataaaaggccatttcacgatttttcagaggaaaaacattgttcctcttcttccttgagcccaggcagccattgatgcactctaagagcttcatacctccatcataaaccatataaacatctcctaatcacctataaccttgattagaaccaattagaagccaaatttcaacctaacccttgagagaacccaattccttgagttcttgagagagagctgagctttggagaggaaaaggaggcgattcaagaatgccagagctaggagaaaggattctccagccttcctcgactgatatgaggtaagaaacttacgttttaaccgtttaatttgtggaatgggagagtgggtgaatagtaactgtaatatctagagttttaaaccatgtgtttaagcctaaattaagccggattaggcataagattaagaattataaatatgctttggaatcctttgaagaaagcttaagaaaatagttgagaacagaaggagaaaacagtttcgaacatctcacgctaacagcgtgagattccatgctaacagcgtggactggtcgagtccacggcgctatcagcgtgggatgccgcgctaatagcgtggatcattcgaatggatggcgctagtagcgtggagatggcgccagtagcgtgggatatgcaaatctggccaattgattcgatcatttcacgctaatagcgtgaaagttgacgccaacagcgtgaaatggtcgagcctatggcgctatcagcgtgaaatgcggcgctatcagcgtggaatcgacggtatgcttttataaaggccatttgagggctgaagagagagagagaaaagaggaaagaaagagagggaagccattgttgatccattgagctttgtatcttcttcatagctcatctaaacacctccgacccaactaagaaaaggatcaggacctcgagataagtgagataccccgatgatttctaagattagctgagaaatagtgagattggatttccctgagaaaacccttgggagctcggagtttgaaagcgaaagaggccgtgattgggcgatctatcctagggaaagtgattccctggtacttctgatcatcacagaggtaagaaactcaagctctaactggtggttctgtgtattggatttcggggttttggggttatcttgaggggtgtttttggaggtgttagagccgttattaggctcagactctgtagagtcttatgctcaggaaggtattctgaggaagttagagccttgattcattattagtgatgaagtttgattttggctctgagtctgtatatgcagatggaaaaggttgactatttgactagtctggaccttagagcagttgacaaagttgctcatgaggttagatagaggggtttgatcagttgaaactgatcattatgagaggttgggtttaggccattataagcagagatatgcttggccatagttgatcagagcttgggtggaggctctgtagccttgtataggctaagaaagatcctgttgggggtctgatgatcacttatacagtgatctagtttggtttgaacggtttagaaccgtaattgatgtgatatatgtttgtttatgtaggacgtgagcctgatagctcaggtggcgttgaccacaggaccgggagaaccggtgactcgtccagagcaggtaagctcttgtttccttgatgtggttcctttgctgtgttccaccacactcctaagggggtgatgggtttgttatgcctatgtggtctgattgattgatgatggatgattgtgccatatgatatggtaatgattgtgatttgatttgtgatgttgtaatctgatttagacccagtgatggtccattgtggtgcatagctataattgttcagctaaatatatgcacgattgattgtgaaatcctatggtaataggatagatgacatgtgtttgagataagcctgacatgagatgttctctgtgatatagagatagcctacttagtgagatggtcctatattcacggattaagcctcctcaggcgaattgtattgatgagacatgagttgtagctcatgatagaggttggaccaatatataggagacctccagacgtggttgtacctatatattttcggaagcgcctctgatacctcctgccatgagatggtctagtgtatataactagatgatagcctccgcaggttggtgatgatggatagtgacgtcctgccatgagatggcctagtatgactaggtgatagcctccgcaggatgaggataggtgatagatggtaatgaccatcagaatcatgtggacattggcagatggatgtatattgattgtatatgtgatgattctgtctgtgtatctgttgtcagtgaaacaggggaaggaaataccttcaagggccctgagtttactgagattttatatctcaccccttgttgtggggctatgttttgcaggtgactcttccagagcagcggagagatcccaaggcaagaagcctgtgcaggattagctgcggatagacacactaggctagaggacttgagcatgttgctcatttattttggttatgtacttggttataccctgatgggttagttgtacagttttgtattgtacagtgagaactttgatgtatattcaccatattatcatgtacagtgttatgacagtgactttgatgatgtcacttctagtgtatgcttccaaactgcttaaactctgattgattatatgcttgattgtgatgtgtggttagtaatgaccctaattagtaaattgggggcgttacattatggtatcagagcagtttgatagggaagcactgtacatatggtgaattctgtgtggtatttgtgtgttagggtgttcattatggtaattgcatgtataactattgagaatgagcttgatcaactcacttcttttgatgtaatatgtgcagtaccatggtgaggacccggaatcagagtggtgaggcaggtgcagatgagcaccctgatccattggccactgccttggctgctatgcagcagttgatgaaggccaatgaggatctgttggctgagttgagagctcagcgtagggaggattctccacatcctatccctgagggcgaggacagtcgccaggtaggaggagcgagtcagcatgttgagggttgcagccagcccggaggtgtaccttcccagtcacttctggaggaggagtctgtggctagaggaagaatgcttacagcttttcgtaagcatgatcctccagcttttcatggagagtatgatcctgttgtggcggccagatggttaaaggccttagagaagatcttcactgtgatggagtgtacagatcatcagcggcttctctatgccacttacatgctgcagggtgatgcccacgagtggtgggataccacggcagagctgatgaggggccagggggaagctatcacctggcagacttttgaggcacagttcctggacacatattttccgcgtgatgcaagagaacagaagcaggcggaatttgaagctcttgttcagggacagatgacagttgaccagtatttggctaagtttaatgagctagccaaatatgctcatttcaggaaggaattacctgataaggagacccttgcagctaagttccagaggggacttagagtggatattgagaagagaatagtgggaggtggatccagagatctaggtagcctggtcaggcagtgcaggcaggtagaggacatgaaccggaggcggagtggcagtttttctactccctctagtagacctgatgagaggagatctagtggtgcaggcccagctggaaaaggcaagggcaaagatttacgggtgtcttctgcagataagtttaagaagactcagaaggatagaccacctagatcaggcacaccttcccgatgtgttacatgtggcaggttccattggggcaagtgtcgtgctggtatgatggtgtgttatagatgtggtcagccgggtcactttgctaaacagtgtccccaggccagagaccaggctgtagctgctccagtgatctcagcagccgcacctaccacaggacgggtttatacagttgaggcaagggaggcagccagtgctccagatttgattaaaggtacggtagttattggtttgtgtgctgttagagttctatttgattccggagccacccattcatttatcagtgatcacactgctacgggactggacttgcctctgtccagactttcctattcctatggaggtgaccatagcctctagggagcagtgtagggtggagagatgctgcagagatgtgcatttcttgtatgacggcagagagtatagtgtggatctgttttgtttgtctatgcctacccttgagatgattttgggtatggattggctgaccagatatggggtcatgcttgattgttgtaacaagagagtagttgtgccttcagatgatattagcccgagttcagttgcattcctttcagtgttacaagctcgtaaggagctgagaggaggagctcaggggtatctgttgttgagtacagcggtacagagacagagagtggatatatctgagattccggtggtgagagagtttgttgatgtgtttcctgatgagattacacagcttccaccggataggggaatagagttctccattgatctggttccaggtgtgggacctatatccatagctccataccgcatgtctcctttagagttaaaggagttgaaggcacagattgaggacttgttgtccaaagagtttatcagacctagtgtttctccgtggggagcaccagtcctctttgtgaaaaagaaggacgggagtatgaggttatgtgtggattacaggcagctgaataaggttactattaagaataagtatcctctgcctcgtattgatgacttgttagatcagttgaggggagcctgtgtgttctctaagatagacctgaggtccggataccatcagattcggattaagcccggagatgttccgaagacagctttcaggtcgaggtatgggcattatgagttccaggtcattccttttggtttgactaatgcaccagcagtgttcatggactacatgaacagagttttcaggccatacctagatcagtttgtggtggtttttattgatgacatactgatctgttctaggagtcaggaagagcatgctgagcacctgagacttgtgttacagattctgagagatcatcagctatatgctaagttctctaagtgtgagttttggctttcagagatgaagtttctgggccatgtgatctctgcagtgggtgtctcagtggatccgagtaaggtggatgctgtgatgtcttgggaaaggcccaagaatgtttcagaagtccgtagcttccttggtcttgcagggtactacaggaggttcattcaggggttttcacagatggtattacccttgactcgacttaccaggaagggtaacccatttgtatggactcatgaatgtgaggaatgttttctgagattgaaagagaagttgaccacagctccagtattagtacttcctgatcctgaaggatgttttgaggtatattgtgatgcttccaagagaggtcttggttgtgtgctgatgcaggataagggggtagtggcttatgcttctagacaattgaagccacatgaggagaattatcctacccatgacttagagcttgcagccattgtatttgctctaaagatatggagacattacctgtatggtgctcagttggtggttttcagtgaccacaagagcctcaagtatctgtttgatcagaaagagctgaacatgaggcagagacggtggatggagtttctcaaagattatgattttgagctgagataccatccaggcaaggctaatgttgtagctgacgccttgagcaggaagcatctgagtgttgcctgcatgatgatctctgactgtgagttgattgaacagttcagagatatgcatctgacggtaactgagggtaccagtggtctagagttgagtcggaccagagttgataacgagctgatacagaggatcagagaggctcagaaacaggatgattcgatcatagatatgatgggccgacgagagtttcactgggagcctgatgatttgatgagatatcaagaccggattgtggtgcctaagggcgagatggtagatgcagtcttgactgaggctcataagggccagttcagtattcatccaggtgctaccaagatgtatcaggatctcagaagaagattttggtggccagggatgaagagggacatagctgagtatgttactagatgtttagtatgtcagaaggttaagattgagcaccagagaccgtcaggtttacttcaaccattacagattcctgagtggaaatgggatagtatttccatggactttgtagttgggcttccgaggactcagactggatgtgattccatctgggtgattgttgatagactgacgaagtctgctcatttcttacctgtgaggactgattacacggcagagaggctggctcagctatatgtcagagagatcgttagactgcatggggttcctgagaacattattagtgacagagatcctaagttcacttccagattttggagtgcgcttcaggagtcatttgggacccagttgagactcagtacagcatatcatcctcagacagatggtcagacagagcggaccatccaaaccttagaggatatgctgagagcatgtgccttggaacaaggtactagatgggatagatatctacctctagtggagttctcgtataataacagttatcatgcaagtttaggcatggctccttatgaggctttgtatggacggagatgtagaactccagtttgctggacagaggtaggtgagaggcagttgttaggacctgatatggttcaagagacgtctgagcagatcaagttgatcagagacaagttgttgaaagctcagagtcgacagaagagtttctatgatcatagacacagaccgctacagtttgaagaaggcgaccatgtgtttctgagactgtccccgataactggtgttggacgggcattaggtgtgaggaagcttagtcctagattcattggtccttaccagatacttcaaaaggtcggaccagtggcatacaggctagctttacctccccagttgtcaggattgcatgatgtattccacgtgtcacagcttaggaagtatatagcagatccttcacacgtggtggagcctgacacggttcagattagagagaatctgacttgccctacgcgaccagtgagaattttggaccgcacagagaagaagatcaggagtaagaccattcctatcatcaaggtccaatgggatggcagatcacctgaagaagtgacttgggagagagagcaagagctgctacagttgtatcccgagttatataccaggtatgatcttaattttgcggacaaaattcttaaaagggggggagtaatgtaatatctagagttttaaaccatgtgtttaagcctaaattaagccggattaggcataagattaagaattataaatatgctttggaatcctttgaagaaagcttaagaaaatagttgagaacagaaggagaaaacagtttcgaacatctcacgctaacagcgtgagattccatgctaacagcgtggactggtcgagtccacggcgctatcagcgtgggatgccgcgctaatagcgtggatcattcgaatggatggcgctagtagcgtggagatggcgccagtagcgtgggatatgcaaatctggccaattgattcgatcatttcacgctaatagcgtgaaagttgacgccaacagcgtgaaatggtcgagcctatggcgctatcagcgtgaaatgcggcgctatcagcgtggaatcgacggtatgcttttataaaggccatttgagggctgaagagagagagagaaaagaggaaagaaagagagggaagccattgttgatccattgagctttgtatcttcttcatagctcatctaaacacctccgacccaactaagaaaaggatcaggacctcgagataagtgagataccccgatgatttctaagattagctgagaaatagtgagattggatttccctgagaaaacccttgggagctcggagtttgaaagcgaaagaggccgtgattgggcgatctatcctagggaaagtgattccctggtacttctgatcatcacagaggtaagaaactcaagctctaactggtggttctgtgtattggatttcggggttttggggttatcttgaggggtgtttttggaggtgttagagccgttattaggctcagactctgtagagtcttatgctcaggaaggtattctgaggaagttagagccttgattcattattagtgatgaagtttgattttggctctgagtctgtatatgcagatggaaaaggttgactatttgactagtctggaccttagagcagttgacaaagttgctcatgaggttagatagaggggtttgatcagttgaaactgatcattatgagaggttgggtttaggccattataagcagagatatgcttggccatagttgatcagagcttgggtggaggctctgtagccttgtataggctaagaaagatcctgttgggggtctgatgatcacttatacagtgatctagtttggtttgaacggtttagaaccgtaattgatgtgatatatgtttgtttatgtaggacgtgagcctgatagctcaggtggcgttgaccacaggaccgggagaaccggtgactcgtccagagcaggtaagctcttgtttccttgatgtggttcctttgctgtgttccaccacactcctaagggggtgatgggtttgttatgcctatgtggtctgattgattgatgatggatgattgtgccatatgatatggtaatgattgtgatttgatttgtgatgttgtaatctgatttagacccagtgatggtccattgtggtgcatagctataattgttcagctaaatatatgcacgattgattgtgaaatcctatggtaataggatagatgacatgtgtttgagataagcctgacatgagatgttctctgtgatatagagatagcctacttagtgagatggtcctatattcacggattaagcctcctcaggcgaattgtattgatgagacatgagttgtagctcatgatagaggttggaccaatatataggagacctccagacgtggttgtacctatatattttcggaagcgcctctgatacctcctgccatgagatggtctagtgtatataactagatgatagcctccgcaggttggtgatgatggatagtgacgtcctgccatgagatggcctagtatgactaggtgatagcctccgcaggatgaggataggtgatagatggtaatgaccatcagaatcatgtggacattggcagatggatgtatattgattgtatatgtgatgattctgtctgtgtatctgttgtcagtgaaacaggggaaggaaataccttcaagggccctgagtttactgagattttatatctcaccccttgttgtggggctatgttttgcaggtgactcttccagagcagcggagagatcccaaggcaagaagcctgtgcaggattagctgcggatagacacactaggctagaggacttgagcatgttgctcatttattttggttatgtacttggttataccctgatgggttagttgtacagttttgtattgtacagtgagaactttgatgtatattcaccatattatcatgtacagtgttatgacagtgactttgatgatgtcacttctagtgtatgcttccaaactgcttaaactctgattgattatatgcttgattgtgatgtgtggttagtaatgaccctaattagtaaattgggggcgttacagtaaccaattgatgatggggctggaattaggcttaggttctttagaaaagaataatcaggaggttgttctgagagatatggaaccttgaaactggaattgtgatgaagtttgagtttggctctgggaaggaagaagtgtgtgtgaacgagaggtactatggcctgtattaacttaagtacccctacaaaagttgttcataaggccaaatgaacggtgaaaacatgttgatatgtatgttttggctgagttgaacaactgttggttttggtattagtaaagctttgaattggtttgtacagagtcttgaagagactctaaggccttagtcagactgaggcaaaccactgagggtcaatgcatggcctagtaggagctgggctaagataaaccttaagttagaagacagaaattgattataacaggaaggatgtttccttcccttcaaacggtcaaacaccgtttctgattacttattccatgcctattatagggcgtgaaatacacatcgctggtagagctcaccacgagaccaggggagctgattctgagctgcgatcaggtaagattagtgttcttggggaattgtttcccctgcttgtgtttactacacccactttgggtgtttgtttgatatatcttgtatgctgatgcttatgatgatatgatactgaatgatgtgcctgatgttgatgaaatggtttgataattgctggcaattgagtgctagctcgaccctgagatagggtatgtttatattggttacactgcgatagtgtataatgtgctggttatgatgatggcttgggtacaatagtatagtgtatgcttgattggattctgttatgagaagattgtgatgtgattgcataaaatctgctggccagtagactgaggaactatagacccctttgggaatgttcccactcggtggatgatctcccttgggataatccataggcatccatgtaaaccctgagtagatgtacctactcggtggatgatcctattcaagtattgggcggcaagtcctgagtagatgtacccacttggtggatgatcctattcaggcatagattgagtgagtcctgagtagatgtacccactcggtggatgatcctattcaggaactcagatgaaagtcctgagagaatgtacccactcggtggatgatctctctcaaacactgtatattgtttgcttatgcttgtttggggtggccatgtgcatgcagatgttcttgtgggccgtgaaggctagttgtatgatgagattttatatgatctgatttctgttatgttatattgtatatatatatgtgtgtgtgtgtgtgtgctggagagtgaaacatggggagggaaacctctgagaaccctgagtttactgggatgattatctcacccctgtttggggctcatgttgtaggaactgagacagaagtcactgagagatcccaaggcaaaaagcctgagctgggataggatggtagagaaccctaggcttagaagaccgagcttgttagctcacattttgtttattttgtctgtattttgatacctagggaaaatttgtatagtttgagaatgatgtaccttgtatatgatataaattcaccatatatgtataaaagtgtatttatattggattcaggcttcctttattatttatttccatgcttgctgcgttactctgatattgtaataatgttaatacgccgggtgcacacggggtgttacaggttgggctagtgcgacccattttgggtgggctgacccactttgtcatccctaactgaagctgagacaacttttttcatttttaaattaaaaaagttgtatgttagaatcctatttgatgttaagcttatggggtaatggaaaaaaatattatgtacaaaaatcataatgagtcctaggaattatcttttttgaaaataaatgaaatctatttgattagtaattataaatatttagataagattcttagaaataaaaaatttatatgatatttttatcatttattttaatgtaatgatagtaatatgatatttcttttatagtaaaaaaaattaaactcgaaaaaaataagattttaacatcttttcatgggaaagtttttttgaaaaattgtttaaaaaacattctcgaaaaatatcttttactaagaatgttaattttttaaaatagatatcaaatatgataaactaaaattttcaagaaactaatatttctccctaccaaacgctccctaaatgtacatcgatcattattcttctagttaggtcatgcctaaagaaacatgagacttaggaattgtattcaattaggattttaaaggattttttttataaaaatatcttgtgatatttaatcgagatttttaaatgacagaaataagttttgtgttattcaatcaagacaattaggattttttaaagagtcaaataaaatctgttggtatttaatcaaatttttttcaacttataaaatgtcttgtggtattcaaaagtatacaaattttgatgaatttttttaaaaatggatttcaatggattttatgaaactttttagtggaaaatataaatatcacactcatcaaacaatcatttttaaacccttgggattattcaagacttttgttcttttcttttcttttttactggttgtcaggtttcttttttctccaatgctctaaccaatatcaaactattaggtttttcttcaattcttgatatgaattttttctttgtggtgcatcagaatatcaagctcatcgtttttgcaattgtggtgaattcattggcgaagtatatatacaccaatatagacatgatatctcaattgtgacaatgaaatcttcatgagcattatcatggattggcttattgtttaaaatagtattttaaaattctaatcctagatgtctctttagcctaaaaacacttagtgtgaagtgaaaactacttctattttgcccaacgtttggctcatctagggtttagcatatcccgctaaacccgatctttccgaggtggttcatcatatcttgtctagctattacatagagattctctggcaagcatcacatgcatttatgattgtgcgtgggctaagggtctcatggagtgttataaaatccgattcgaaccggccggtcaaactgggacccggtggcctaacggggtcggttccgctttcagatcagttaagcaaatgacccaagttaaccttgtcaaactcgtctaggttggtcatcagatctctgtctaacccgacctatttttttattaaaaaagattttttttaagaaaattggatttttttttaatttgaattttgaagtatagatagatttttcttactcatataatgttagttatatatacttatatacaatagatacatatatgatttttaatttttaatatatcaggtcaaatcgtgtcaattacaggcctactagttaaaccattgatccactaatctactaccttgaccagatcaatgatccgattgaattttacaactatgacctcatgacgtgctcgacaagaaaggcaattgcctaaatgctcatgattggtcgaatgtcgaatgtcgaatggggcatcaagcaaaggttcgactgagggggtcaaagaggtacatagtttcgcaatgttgagtgtgtaagtacgaaggaaccaagaaaagaaagcttgctcggcttaaatccaacctaggataccgaaggggtacaatcatcttttattgtgattttatcttcaagttttaattatgtgtgttcctaatttttattcgatttatgatcactcaaagtaaatgcaacatcagcatcttatgctatgccgacaaaatctattagttgtttaatgaataacgggcaaactgaatagaaatttgatgtgacattaacatgatatgatactaataaaagaaaatactcttagactcttagcttaagttttaaattggagattaattaacgaaactctcatgtcatcatttaattaattcaattaattaatactttactacaataaattaactacccgtgttatctcaagttgtgttaaaaaattataaataatattttatgtttatagtagtcttatatagttcgacgatatcaaatatctaacatgttttggacgctgatgattttaaaataatcaatcattcaatttattattaaattttgatctaatgtaattcaacttgataatatttaaacatgaatcatacctaattttgattcaaccagctactacatttttaattattagtctccttttgtagtaagggcagtattcttaataataaattgcttatggatagttgatattttactgtatcaaatattttatttgattgaaatgggcaaaagaaacaaaataatatttttttaataaataattaccaataaagggttgtttttaaaatatttacagactgtgtaacatgcctggattagacatgttacaacacgcctagattgggcgtgttgtaacatgcctaatccaggcatgttacagctgccccatttttgtaaatatggtcccccctcagcatttcccgcatatgttgccttgcagtcttctgtgtctttgctaaattgcctaccattctagtgtattttcgttttttttaaagatttttgaagttgttttgagtgacgagaagcatgagttcaagtggtgattatgttcgcgtttgagggattagggtttgctgggcatggttaggttgtgtttagggtatggtcatgtgacgatagtttgtggttaagggtttagggtttggtgtgcatgagacgtgacgtttgggctagggtagggttagggttaggtttcatggtcatgtgacgatggtttgcgattaatggtttagggtttggtgggcatggtatgtgacgtttgggctagggttggggtaaggttaggtttcatggtcatgtgacgatgatttgcgttaatggtttaggatttggtgagcatggtatgtgacatttgggctagggttgggttagggttagtttcaacttggcaaactacttcaccttcttcatcagctcatgctcatagtcctcagagtaaccctttaatccccgcaaactgctttcaacaacttggcaaaacaaatgcagcaaatcacttgttacaactgtgatcagtgaggacggtggtcttagtgctgtccttccaaatgccccaaaaccaaacctttctcacctagaaaagattccacaataggaacatacagtgcccttgtggccatggctcatgcggaatgaactcacgatatggcaaggactactatgcctgccccatcaacctaaccaacatcaacagtaaatcattaaccattaacctgaaccccccaaaccctaaaagcatgaacctcaatgtacattgtttcgacttgtgccaagtccatcatcatatacacagataagaagcaaaacacaacaagaaaaaatcacgctaaccctgttatcgaggaattagggacttgactgacctgggaagtcgaataaagtcacgggttaaaatgagtttttcattagttgtttccacttatggcaagtccatcatcatatacacaacaccaatcactctcttcactcttcactctgcattgagaagaagcaaaacacaacaagaaagaaaacgtctgatcatgtctttctcccgttcaccttcttcatcagctcatgctcatagtcctcagagtaaccctttaatccccacaaactgctctcaacaacttggcaaaatgaatgcaacaaagcacttgttacaattgtcatcagtgaggacgttggtcttagtgttgtccttccaaatcccccaaaaccaaacctttctcacctagaaaagattcctctattccctccaacaggaacatacagtgcccttgtggccatgactcttgcgaaatcaaatcacgctatggcaaggactattatgcctgccccatcaacctaaccaacataaacagtaaatcattaaccataaacccttacaccatgtacccatgcccaccgaaaccataaaccctaaaccataccccctaaaatcctggactgccaatcctaaaccctataccctaaatccaaaccatttaacacaaaccctagccatttaaaccaacatacacctaacccataaacccacacaccttaaacactaaaccattaacctcaaccccccaaaccctaaaaacatgaacctcgacgtacattgtttccacttgtgccaagtccatcatcatatacacagataagaagcaaaacacaacaagaaaaaatcacactgaccctgttatcgaggaattagggacttgactgacctcgggagtggaataaagtcacgggttatcatttggccctgtgtttctagctatcatatgtctagtgccatttctgacaacttcgtgaactaaacaaggagaaaaacaaagacacaacaccaatcactctcttcactcttcactctgcattgagaagaagcaaaacacaaatggaacatacagtgcccttatggccatggctcttgcgaaatgaactcacgctatggcaaggactactatgccatccccatcaacctaaccaacatctacagttgatcattaaccataaaccctaacaccctgtacccatgcccactaaaaccataaaccctaaaccctaccccctgcataccccctacaaccatggaccgccaatcctaaaccctatacccaaaatccaaaccatttaacacaaaccctaaaccatttaaaccaccaacatacacctaacccataaacccacacaccctaaaagcaagaacctcgacgtacattatttccagtagtgccacatccatcatcatatacatagagaagaagcaaaacacaacaagaaagaaagcgtctgatcatgtctttttctcattcaccttcttcatcagctcatgctcatggtcctcagagtaacccttcaatcccagcaaactgctctcaacaacttggcaaacaaatgcaacaaataacttgttacaactatcatcagtgaggacgttggtcttagtgttgtccttctaaatccccccaaaccaaacttttctcacctagaaaatattccactattccctccaacaggaacatacagtgtctttacagatgcagtttttgatgtgcctagacaatagacatgcatttattatatatacgtatcgaaatcataataacaaatttttagtcgattgtcgagattcaaagaatcaattaaaatctaatatttgtttactaaacattaaataaaagaattttaaagaattcccataaagtagagatttatttatttttgaatcataaaccctaaatctgtaacccaagccctaaaccctaatcacaacataagccccaaaccgtaaatcggaatccgtaaaccctaagtctgtaacccaagacctaaaccctaatcacaacataagccccaacccctaaaccggaatccataaaccctaagtctgtaacccaagcccttaaccttactcacaacataagccctaaaactaaatcggaaatccataaaccctaagtctataactcaagccctaaaccctaatcacaacataagccctaaaactaaaccggaatccataaaccctaagtctgtaacccaagccctaaaccctaacacaacataagccctaaaactaaaccggaatccataaaccctaggtctgtaacccaagacctaaaccctaattatacatatattgattgggcgtcattcaacacgcccaccaaccctaaaccatgcaaccagaacaatgaaacctaaccctaccccaaccctagcccaaacgtcacgtcccatgcccaccaaaccctaaaccattaatcgcaaaccattgtcacatgaccatgaaacctaaccctaccccaacctagcccaaacgtcacgtcccatgcccaccaaaccctaaacccttaaccacaaactatcgtcacatgaccataccctaaacacaacctaaccatgcccagcaaaccctaatccctcaaacgcgaacataatcaccacttgaactcatgtttctcgtcactcaaaacaacttcaaaaatctctgaaaaaaaaataaaaatacactagaatggtaggcagtttagcaaagacacagaagactgcaaggcaacatatgcgagaaatgctgagggggggccatatttacaaaaatgggacagctgtaacatgcctggattaggcatgttacacagccccatttctgtaaatattttggaaacagtcccttattgataaatatttattaaaaaaatattattttgattcttttaccgattgaaatgtgaatatagttttctttaaagttaataaaataaatttataaattaatataatataagtaattaattgctgcctaacaaaaatattttttttatcggcaataaaattatgtattgatcaaaaggcatcagaaatgccaagagtttctacaaaagaaataactgtacatgtaactgaaatataaagcaccagaatgtattggttacttcgtattttataagaggacagcatcataaatactatataaccacccactctcatgctataaaaatacctcagcatattagcatattcatcttcacgtgaggttattacgtgtcttcatcaaagctacctctcgggtatgaatagggtcgtggcaactgtaagagcatttagttagttttcttagaccttcaaattatctaaggcctaaaaaatgttatattttaaaaaagtatattaattatttatttggattttacataatattataaagatattgcaagacatatagacaaaagaaatttatattttacttaaaatattaattatttaaaaaaaatattttttttaaatatatacattgtattttaaagtgttattcataatatttataattattgttattgttgaaagtgatgttgtaaaattaaagctactcattttttctttgatattaagtatgttaaaagataaattgaatgtttttttttttttttatataccctcaatccatttttcatgaaatcccaatcaatcgatgaagcatgtaaagcaagaacttccaattcatgaaatcaaatgtttttcatagtctactttaaaaatcatgcgtttcttcttcaatctctttgcctcctccaccacctcatttgtccccaaggtcctttgtagcaattgtctatcttccgcaacaacgttttgcctttgttgtatcactttccccaaaacctttttgagtctatttgatagaattttggccaaaatcttgtacaagcatcctacaagagaaattagcctaaattctcccaaattttgtggatccattacctttggaatgagagaaatacaatatgaaatacatccctttgggaagatcccataggaatgaaactcccacaaaaatctcatgacatcctcattaagaaaattccaaaaggctttgataaacttaaaattgaattcatctgatcccagacttttcaagttttcaaattcccaaaccattatcctcacctcactttcttcaaatttggctatcaacaaagcattatccttactagatgaagaattgaatctcaccccttccaattttggtcttagggattgatcctctttaaatctatcattgaaaaaatacaccacttcatccttaactctacttggatcctacacctaatctcctccaatatgcaatcctttcaaagcgttttcccccttctccaattaatacaagagtggaaggattatctagaatacttatctccctccgacacctatttaattctagatttttgtctcaacaaggattcaatacacattaccattgtaacgacccgcctcgtcgctacgatatcgctactcgaaaacgcggaatttcaatttttaagtaaaaattctattatttgattatgaaaacggtgataaaatttttatgatatacattcaccaaataatgcataagtatatatatatatatatatatatatatagagagagagagagagagagacattaaatcactatacatcgttcacatgtcaaaatataattcagtttttatatgtatctaaaccctaggatttacatgcccaatcaaaaaaacaaagaactaactaaggaagagttttgaaaacaaaacaaaaaacacaattctcccaaaagaaactccatcgttatcatgtcatcctggcgactccaacaaaagacctccctctaaaggacaactattgttggtcatctgctcctacgaaggaaagttcgagatcatcacaagcgccaaccacatcacaatcattcttaataatccattagttcaacatacactcaacaaactagtcattaacttttcaacaattcaaatcaattatactcagaatgatacatgcacctgactcaactctcaaatgcaatgtggtaccattcatcagcaagtagcctaagtgtgtcctcatgacactctcacttaggaaaacttagaaacaactgtcgaggtcacccaatcttgcacatgccactccctccatgttgatcagcatgagtattaaggaagttccaaaccgagtgttattcccctaagtaccaacatttttcatcatgaaaaaacacaggtacttactgacaaagtttatactattttcacacaattaagcagtatgaaacatgagctccaacaatgcaccggccttcaatagttaaaaacttaaacaatcatcttccctctctagaaatgcttaaaaattttaaaccaaattgtcttccctctccagggatattcagacaatcactgcacccctcattacatacacaacatgcaatcatctcactgacatcatcaacattaacatcatctcatctcaatgttatcatcaatatcatctaatctcaatgtcatcatcaacatcatctcatctcaatgtcatccacatcacaagaaatcgcatttcacatacatacatataaactcatgcatgggattcacattccccaggtcttcagataacataaatcacatgtaataataattcgtaatataacgatactgatattttagggaaaattctaaattaaagagaagaactatagtatacaagaaaaattataagcccatttaaaatttaataaaagaagtaataaagaaaacaaatataaaattttgggtagagtctcttctgtaattaaggcttttcccaaaattctagtcaatacaacaacaacatcattcatggttttattcatcaataacaaatacatcgcatcccattagtttaaaacatagtttttcttgaaaaccagcatgcaacagggacaaacatacaaccctaaaattgggttccgagaccccaactatggtgtcaaaagctataaacaagtccataaaatcctctcacctatcaatatctccccaatagctcctcgcaatgtcgtttatagatctcttaggttcatgtccgttggtccaaacgtagaggtctatataccaaatcgaagacaatttagtataaatttcaaagacatggtcaattttaaaattcggggtcaaatacccattccattttaaaaagggatacaatggtgtttttggggtccacaccaagagacgtcattttgagattttgatcacaccaatgtgatcggggttcaacaacacaaaagcgagttgatgtcactaagcgaattacttcctctggaaggaattgcgcttagcgagtaggtgttgctaaacgaattatttcctctagatggaattgcgcttagcgagctagtttcgctaagtgagttgttccaatgcaaatcaaacaaactccacttaacctaacatccataccaaacacttgcacaaggataattcaaacaacagttcaactaatccaaatttgtcaagtaattaaacaatgcaagcaatacatcaaacatctattttcagttattaaaatttcaggacattatgtaatatctggaattttttaaacatatgagtaagcacgtgttaatcttaggattaaccttataatggaggaaatattattaggccttggaatcccttggaaggaggcttaaacgcttgagaaagagtggaaataggcttttctggcctgcggcgcgacccacgtgaagtgcggcgcgacccgcgccatatgtataaatataccaatgctgtctgacatcccaagtgggtagcgtggatgtccaagtgggtagcgtgaagtacggcgcgagtagcgtgggaagtggcttagaaatggtattttcttctgccagcccaagtgggtagcgtgaagtgcggcgcgagtagcgtgggaacgtcggcagaaccagaatttaaaggccaaaacgcgaaaaaggagaggaaaatcagcctttcttcctccttgagcctccaacctccattgatgacttgcccagcttcctagggccatgttttgtgacccctaaacactccagaacccagtaaacctccgagaaactgagtgagagcgagaatccttcctccctttcaccgaaacctccagtttctgaggaacctccagagaggtggatgaaagctcgagtttggcgaggaacggcggtggttcagctgcaccaaggctagggagagtagcctagaggccttcctcagcagttttgaggtaagaaactcgagtttctccgattgattttggatttgggggttttgggtgaatagtgacccatctatgatagggctagaattagctctgggtccagttgggagaagtgtttagaatgatgagaggaggaaggattagctttcagtttgtgatttggagactgttggttttggctctaggtgaggcatgtgtgacttggactgagtcacttgatttcagacatgccagagcctttgtgatgggcttgaggtgcctgataggccatggagacagtgtctggtgagatagaccgtccaagccctgagaaacccagaggatttgggttgttagagctttgagctctctgaagatgcttgtggatctgaagggactctgaggccatgtttgatctgtgatagaccactgagggtctatggaaaggcttgtgatagatgagcctgatgaaccttaggcagatgacctgggtgaaagaagggactgaggtttccttctctgaggcagtggatgtttgcttaatgagcttatgcatgtttatatgcttgaatggtctgtgatgtgtgtttgtgtgccttggtagggcttgacacagagggtgtcagaggagcagaccatcaggggaggctagagctaagaggcacagctagccaggtaagctcatcgttctggggttttcccttattttggtttatcacccaagtaaggtgaagctggcatgttttgttgatatatatatatatatatatatatatatatatgtgtgtgtgtgcatgccatgcgtatgagaaatggccaaggtggcctctgatattgtatatatctgatgatgagctgagaggctctatgagtaggtcttagagtgtaactcagaccattctagaaagatgaaccctaggatagacactatgacagtgtgagggttatgagacacctgatgtggcaggtgtgaggccgtgggctttttgagagaatgcagatcatgagatggtctgtgatggaacctaaaggatactggatgagtatcaggctagttgaggttccctagccagaggtagagtttgaggactccctggaatagctgagattccttgggaggtgccactgctctccacttaagacctaaggacagatggaactgtgtggatgttcctccttaggcacagatgttgaaagtcctgagtggttaacctcaggccagtgtttatgaaagtcctggaggtgattgccctatatggatgtttttgcctaggcatgtgttgtgaagtcctggacggctatttcccaggccagatgctagacagatatgttgtatctctaagagagggcttcccgagggggactagagcctaaggcctcttagatgagccatatctggatttacagagtcctgagttgagggttctcctcaggccatgtttgcatgattcagagtcctgagttgagggttctcctcaggcaatgtttgtgtggttcagaggcggtgcctctcttgtgttgagaagtgtctaatgagagacacgatgataggtatctctgtgagatgtctgtgagccaggctatgagagcctagatgagatattgatgccatggttatggctttgttctctgtgatatggctgagagagccaggacgaggttgaatacctctgatgctgagagcatccgattatgacccagagagctgggatgtgtgaaagctagggtgttgtcctagtctttgtatgtgtgagctaggaggattttcctcagctctgttatatgttttgtttacgcttgatggtaaaccagggttagggaggattcccagaaccctgagtttactgagacatttgtctcaccctgtgtggggtttgtggttttcaggtgcttcttgaggagaggagcgacctcagggcaggaggccctagtgaacctgagaggctggatgggaggctgcagtagaagaccaaagcagagtttcaagaatagaagctggtcttagaatctctgtgtagttgtagggtatgtgtatacccatttcctgtacatattataatgtatgacccagctgtggtcttgtttttgagcatgtatatgtacagatgatgatgatgtatataagtgtgtttcctcctgattatctgagtttgttttatgtcatctgcctatataattgtttatgtttgatctggatcagcaggggtttgttttaggtttctgtgtgtggttttatatttcatgcataatgtaatcaagataaacgattctatcgcttccgcaccgcgcttactaaacgctaatagcgtgttatgtatatcattgatgataacatgccggagacgtccggggtgttacacattacaaccaccctccaaaagtcctcttgaagttttattttcctccttatttcttcttcaaaagactcatatcatcctcttttttctccaattcactcatatctttgtcaatttgtgcttgtcttttctccaagataccaaatttctccttgtttcatacttttacccattcttcaaagctatcaatttctcctttagaacaaatgcccctcaatccatcaaactttaaattccttcaagtatctcccacaaacttaataaaaaattcatacaaaaaaaacaattgaggaccttaaatgctttgaatacttcaattcatcagaggaaagtgcagaggtgataatatttttagctttaaaatcatattgtgcagccttttgttcagcctcagtcatctcatcccattctttgggaatcaattcatttgccacagttttctttggaataaaaggatctttcactattgcattccatgctcctgggtcatttgattgaataaagatcttcattctatttttccaaaaattgaattgttccccttcaaacataggaggtctgtttaaagaggcaccccccttaaaggttatttgtgaagtattcatatttctttttgaaaagaaaaaatgatcttgagtaactttcaagaaccatctcttgatgccaattgaaaatgataggaacactttaaaacaaccaagaggggggtgaattggttgaaccttggtaaattaaaattttcaaataagagtttccacaggatctttatcactttaaaaattgttttgaaatcaagaatcttatattcaatcaaattcctctgtcaagaaatcaataagcaaatgatagttttctgtgtaatgaaatttgattcacaaacaaagcaattgagagatgaagagataggaataaagaccagccacagattttatactggttcacttcaaacactatgaagctacatccagttctttcattcaacaccagggtagagttccactattgcaaataatattcttacaagatattacaagcctctctttatcaaccctagataaagttcagaagtctaaaacactattagacccttagagaacaaacccaaaactgagaacactactcaacagcccttagagaaacactatctctaatcttcatgtaagaaaccaattttcgataagctaatctttacagaaatcaattaaaagatttacaccttcaaagaataaggaaagatttcacctgataatccaaagaacacatgcatgtgaatgattcaacaggttgaaagaaagattacagactcaatgcatccctttccttaagctttgaaactcatgatgcttcacttctttaagaccaaaaacccgtacgaatttgtgaatccgaaatgcttttagaaacccagaaatacactaatgaaagcttaagagtgtttgtgattgctcagatttcgaaattctcaagttacaaaaacacagagcaagagtttctatttaaaacagcttttcaactgaaaataatcgattaaacacgctcctgtaatcgattatttcgcatttgtaattgattaattcaagaatctaatcgattaaaatgctcctgataagttttgggtttgagctatgaacaatgtaatcgattattccgtgaagtaatcgattaaggcagacattcatgtttttccaaatgcactatgtaatcgattactaaatttggtaatcgattaaggcagtcagtcctatattctcaaatgtactaggtaatcgattaagacaatatgtaatcgattaaaccaactgatcatgtaatccataggcatagatataatcgattacgaacttatgtaatcgattaagacagtcagcatgatttttctattttagcctatataatcgattaattcgatatgtaatcgataacaatgttcttgatttgttttccagaaggcactaagaacaaaaataatcgatgccattaatgctgtaatcgattaatgcaggaaaacttcatttttccaaaaactttgctttttaaatgccttatttgttaattgcttttacttagaccttcaatttaacaatcctagatgaatgactatgcatgatatgctcttcgattatcagattacacaacttccttttacatgaatcaaattgatcttcataacttctttggcatttttccaatgaggcatgttgaaagcacaaaacaccaaagcttgatccttgttcatttatgcatggctcctcttgaatcaacaatgtcttcttggctcatctctaccaagtaattgttgaattcttgtctttcacctacatttatatcttcccctctgacaccaactcttttgcaagatcttctaacataattaaagtctccaatcacacaccaagtagctatgtttttattagctttcctactttttatgtcctcccacatcctcctccttcccaacctatcacaaagtgcatatatgttgataattattacttcttttccattgtttgtccatacctcttccacaccaataaattcatttgccacaaaatgactttttatctaaaacaacttttatcccaaatacacaaaattccatctaccctctaccggagatgccacccattgcaaccctctatgtccacatatttaacagcaaaatgcataattcaccttctccatcttggtttcttgaatgcacaaaaactgattttcctccttttgcaccaattgttaattcaagtgaagccaagtatcaatgaatgaaaatcaagcttcaaggttttggactttcaaacatgcacaaaagaatatgctcaaaggaaagcttgaagaatcaatttgatcatttgtaaaaggaagtatatgatctgataatccaagtgtatgcatcatgcatcattcattcattttaagatcattggattaattgattaagtaaaagcaattgattagaaaggcacttagaatgcaaagtttttggaaaaataaagttgctaataaataatcgattacaagaatagtagcatcgattattttgttcttcgtgtcctttaaaaaacaaaacatgatcattgtaatcgattacatatcgttttaatcgattactcaggctttttatgaaagatggagctctctgtcttaatcgattacataagtgtttaatcgattacatgcctgaacatgcatcttaggaaaatacatgccgactgtcataaacgattacttcacgaaataatcgattatattgttctttgtctaaacccagaaaagctcaagatcattttaatcgattacattatttcattaatcaattacgaggtttattttggaaaaacatgtgcctctggctcaatcgattacatatcggaataatcgattaaatggttcgttcttgaaactcaaaacgttttataaacagtttaatcgattactatcttgatttaatagattacaaatgataaataatcgattactggagtgtgtttaatcgattattttcagttaaaaagttgttataaatagaacctcttaggctgaggtttgtaacttttgatcatttgtgaaattttgaattctaaagcattcacaaacactctgagctttcattagtgagattctctgtgttctaaacatacctagcttcacaaaattcatatgggtttttgaattaagaaggtgaagcatttgttcattcaaagattaaggaaagggaatgcattaagttgattatctgtcattcaattcgtggattcattcatttacatgcattcttggattatcaggtgatgtctttccttgttctttgatggtgtaaactgttaattgaatttttgtaaagattagtctattgtaaatgggtttcttgcaagtgtagagatagtgtttctctaggaacagctgagtagtgttctcagtgtgtggttttggtctctaaggatctaatagggttttagatttctgaacttcatctagggttgatgaagagaggcttgtaaagttgcttgtaagaatatttttttgcaatagtggaactctactctagtgttgagtggaagaactggatgtagcctcatggtgtttgaggtgaaccagtataaaatctgtggctaatctttctcttaatctcatcatctctttattactttgtttgtgaatcaatttcattgcacagaattctatactctgttttctattctgttggaaagggaatttgattgaatattgattcttggtgttgaaataattttgaatgtgataaagatcctgtggtgactctgattttaaaattttaattggccaagattcaaccaattcatccccctcttggttgttttgaagtgttcctttgtttttcaccaattttctcataaacttccttttcactctccccccctaagccccttatattgtatgtgagaatcttcattgaccacccttattaactcccttcacaaacttcgctttggcctttgtgacttctagtttatctcttctctccattatctttatctttccttcaatgaccttatcttttccttcaaatgaaaccctacaatttttgcccatttcccacgctttttagatttttcccttcttcattgacccaaagcattttgttatgattattaatctcgttatttgtcaccacattgttgttactgcttccaacattgatggttttgtttgttgcatgtgttccatgcgatgttgagccttcacatagtattgattctcctctaataggcccaattgcaatccctcttattagtgtccataacctatttccaatgccttcagttcctgatgatgccctcataggcttcttcttttttttgttctttttatctggcccaatttctatgttatcaatatgaaacacaaatggaccacctgacttttgtcgatgggtcgtattatctatgcatacaacctctttattttggcccaaaactacctttacctcttcaaccttttctatgttgattgttaccatatgtggaccatccccttcgtcttctccgcgtttcccttctttattttgaatttccttgtcttgtctcctatcatcacattccatttgtttactttcaattcactcccaattttcaatcgacccaattattgtgtcctccactttttctgccattttgttcccctatcctcttcaatctctcatacttctatggttccgtccatttcatcaccagttgttgacgagatgttcaccatgtctttcttttgtacctctgtctcattgaatatttggaggttaataccccttatgttattttttgaataacttctcgttaactccctccgatcgttgttgaaagtcccctcctgctattgcaccccctcatgttcaacgagcatcatatcctcatcttcattatcaaagcaggatgggatcatttctaccctatagatgcttctcgccgagtcttcttttgctgattcatcttctccatctccaacattcacacttctgacctttataaggagcctcctcctctgctctaataatatgaacattgtcgctaatcttaatttttccgtagtagctgatatgttgtgcactagaagttttaatcagaattctagcatctttaacccattccatggtttttgcctctttgtttgatgccacatatttcccaaatggatttgcaatctctgtaaagcattctagccccgcaaatgtgcaagggaatgctagtacttctaatccatgctaggtgattccttgtggttgtgtcttcactccatttgtgaatggaatgaaatattgattagatcccctcctatttcgcgttcactttctctatcaaaaatctcttcagaaattcctgatatctacaccatattctcccccaatgtattgtatttttatgttgcctctatcttcaaacaagaaaatatcacttaatctgtcaaataacattaagtccttcagtcatcctatcctactttgattaagtcattctctgagtatcagcgacttgtatctctttgctccatcatatggattatctagttgtccaattcagttgatctttcctcttccatcctaaacatccttaatgttcatggaccacttgtgcataagatttgtcccccacgatctgcttccatttgtctagaaaggtaacttgtttttcttttcctttattgttattctgttttccttttgctttccattcatcttcaaatgttaattattagtttgttagtttttgttagtgagagaatttgaacctacaacttatcccttcctccctaccttcaccttttattgtcaagttaaccttatatctccttgttcctttcgtgtaacttcctctaggataatgtttgtgtgtaccttctccctcgttcactctgagttcccctcccccctctttcactccttctctctactttcactctcatatcttgattataggacaacatgattgcctaacaaaaatagtggaatgagaaaacctccattcttacattaaaatgttagtgagatgttgataggatgtatgataatatttattcttatcaacaaagacgagttataaagaaaattaaacaaaaccttacaaattaaatgcattgattagttttaacataatcaaccaacagactagtattattaaaagctcaattctcttctctcttttttgatacaaagggtgcttcacaacaactaagcaactatgtgtaacaaaaaaaaaaaaaaacaactaactaattcctagaaccgaaatgatttaacaaccaaaggaaagaaagaaaacaacatttaaatcattttatgaaaatatatatgaataaaagtatgttatataaactttaaatacatagaataaaatatagaaaaataattgataacaacaattaaattatttttgtaaagttattttttctttctttcttagagaagttaagctattttatcgagagtgtgaaattaggaatatctatattaggttcgcattggcatgatgattggccatatggctacatcaggagaaatgaaaagtcatatgccacagaaattacaaagcataaaataagaaaacatccaactcagaagcccacgcacaaaaaatatagtcggtccattttagtttctatagaaaaagattatcaagtattttattgaaattattgacatgagattttattctttaattatatatttttttaatacacaactagttacttaaagtgaatatttaaaaattgttaataatttaaattgatatgaaaattattaaataaataaagaactaaaatgtcttatatttacatgcaacttttaaaaattaattagtatttttcttttatacttacacaactattcaataattcaagtaactttgtgctcggtttgataatatcagattttcatgcatacatcgcatgaacggattaatgaaaaattacattaaattgaaattcactgttatgataatattatagaagtttgaagaaaaaaaattatttggcagaaagagaaattcatataaataataacctgagatttatgtttacaaaaataataatgaatgggacaagtataaatgtacacattaaaaagataaataaattatgccagttagacattaaagataaaactaaatatactcattaaaggctgataggcagttgttataaaacaaacctacatataaacaaaatgttaacaagtatttttaagatattgattaagaaagtagaaagaaaaatatttttatggaaatacacaaaaattgtattgttcatttacgatatccacaacaaatatttttttcattttaattatttaaccaatattttaaggatattggttgggaagatcatatatttaaatatgttagttgattagaaattattattcaaaaaataaattaattatgacttaatttaataaaaaaattaagaaaattattcttatgagatgacagtacaacaacagaatgaggctaatattgttttgttagtagaaagaggctaatacgtgaacattttattttatttaataatataattttaataactatttcagtatatcttactctcatttattgatatgaaaattaaggcataaaataaactattaagagaagatattttagaattcctcaaatagaaaaaaaaagtgttacccatatatattcaagtcattaagaatatgtataaggggttccttaaaaataatatttagttattttatttttcatttatttgataaattttgtatattaattagttagacatttgatacaaaatgcatttcaaatgcatatttattattaatagagatggtaaaatggacgactcggatcggactggactaggccaaatagtgtaatcggattgatctatgcctgatccatattcttgcactctagctactacaaaaataagttttaacatctctctgttaacatcggttttgatgaaaaccaatgttacaaatgcgcagtgacatttttgtaaataaaatgtcattgttaacattgattttggaaaaattgaggacaattttaacatcaatttttaaaaaatcgatattgtaaatactcacttgacattagttttttaaaaactgatgttaagattctcattttaacatcatttttaaaaaaattgatggtgagacctttaaaaataaaacccccttctctgtttcaaaaccccctttctcacttcgaaccttgtctctctctttaaatcccccctcgaacccacttcgccccaccctccttcattcatcttcattccacacaaaccctcctttgcgtcttcctcccacaccatcgcccccatcctcctttaattcattttcgaccttctttctactgcccctaccatgcaactcgccctatgcacctgatatgttgctagcatttaatagctttaggctaaaataatcaataattcaatcataatttaacaataaaggttaggataagtttaaatttcatcaattcttggtccattacttattttatgcatattttatttaataggaatcaagaaaagaaggaaagaagtagaaccaagaaagatttctcacaaaaatagaatgccagaaagggtttagttaccttaattaactatatggaccaggaaaaataaatagaagacacttttggacagaaaaacacacagaaacatatagaaacgcaaaagagaaggtggaggaagaatcaaagctagcaggaaaggattgaatcaagattggaagcaattatttctcctgttgtcttgagattctttgtctaggtacatgttattcatgtgtttaaggttagttatcagcatgtctggctaactccccttattgtggttagggccaaaaactaatgtgaactcctctgtattaaattggtattgagattaatgttatgattgttttattctatcttgtgcttatattgcttctgcctccatagaattgatcactctattagggttctaagggatgttggaactctgatttctgatagtggtagaataatagttgttacattacctagggatagggatggacaattacagaataattgatgtattttcctaatgcttaacttaataaggaattactaaagaattaggatttcgagttggttaaagggttaaattactaagggattaggatttcactaaattatatcaaatacatcctctaagcaattataacaattgaaatcaatcaccaatttgaatatagaaggtaaggatcagaagtagaggtgctttgaccacaattatttctcaccactgcataacatttaattaaaacttattttttaattctcgttaattttctattcagttatttaatttttgtaattctaaaatccaatcatattctcttcagaacatattatttgtcttccaattttaagataataatttgcgataaaatttgtgcctcaatccctgtggagacgatactctacttactcactttattacttggaacgaacggtgcacttgccgtttcgcaacaaatttttggcgccgttgccggggattgaaaatgccaattttatagtaactctttatctttaaaattggatttattttgttactgatctgcttactgagtttatgcaaggtatagttaatcctgatcatctaaagtacgatcctgaaatagagaaagctgctaagaggaacaggaaagtggccagacaaagaagagaagcaggaaattatgattctagttcaacctttgaattagagttagagatggctgacagagtcaataattagccaagaccggaagatgaactgatgaaggatattctggctccattgttcactagatcaaattccaatattgtcagaccaccaattcaagcgaacaattttgatattcatccttcattgattacattggtggaacacatttagtttggtggggaagatgatgaagacctccatgacttcattaacagatttctgagaatctgtgatactatcagacattaaggggtgtcggatgatgctatcagattgaggttatttccttttgctgtcaaaggaaaagcgctccaatggttagacagacagacctcaaatagcatcaccacttgggaagagttggttgcaaaatttttctcccaatatttttccatggagaaatacaataggttagtgaatgagatcaccaatttcactcagaatgggagagaaactttatgtgcagcctggaatagatttcaagagctgattaggaagtgtccacaatatgacatacctggttacaatcaaattccagtagcaccggaagaccaagaaaagacagccttcacatgtccatttggagtgttcgcttacagaaggatgccctttggcctatccaatgcgcccgcgacatttcaaaggtgtatgctttctatcttttctgatatggtagaaaaaggtttagaggtatttatggatgatttttctgttttttgctctagttttgattcatgtctagttaatttagctaaggttttgaaaagatgccaagaaacaaatttggttttaaattgggaaaaatgtcacttcatggttcgtgatgggattgtgttaggccataaaatttctgaaaaaggaatagaggttgatagagctaaattattgttaattgaaaaattgcctcctcctattaatgttaatggtgttcggagtttcttaggtcatgcaggattctacaggaggttcatcaaggacttgtccaagattgcaaaacctcttagccaattacttgaaaagggagtagaattttgttttaatgaaccttgtcttaatgcatttaatgtgttgaaaaataagcttaccactgcacctattttaatggcccctgattggaatttaccatttgaacttatgtgtgatgcaagtgcttatgaaattggtgctgttttaggacaaagaaaagataagcgtctacatgttatatattatgctagtaagattttaattgaggcataagttaattatgctaccattgaaaaagaaatgctagttgtagtatatgtattagacaagtttaggtcctatttggtaggttctaaggttattgtgtatactgaccatgctgctcttaaattcttgatgactaagcaagatgcaaagccatgcttgttgcgttggatgcttttatttcaggagtttgacttggaaatcaaggataaagctggggtagaaaataaagtagttgatcacttgtcaaggattcaagaaaagactttgcaagatgggccaaaattggaaatcaatgaatattttcctgatgagagagtgatggcaattcaaatcagcccatgatttgcagagatggccaactataaagctgtaggtgcaatgcctgaagatcttaattggcaacagaaaaagaagctccttcatgatgcgaagaggtatttatgggataaccctttcctttattttcaatgtactaatggtgttattcgcagatgtgcaactgaatcaaaggtacctaaaatcctttggcattgtcatgcttcggattacagaggacattttggaggaaatatgacagcacaaaaggtcttgcaatgtggttattattggccaacactcttcaaagatgcaagagattttgtggaaaaatgtgataactgttagagaacaggaaatatctctcgtaaagatgaaatgccactaaataacattcaagaagttgagttgtttgatgtatggggaattgattttatgggacctttccttaaatcatattccaaccaatatatcttggttgttgtagattacgtgtctaaatgggtggaggctacagctctacctacaaatgatgccaaagtggtggtatcattcttgcggaataatatcttcacccgctttggagtaccaagggctattatcagtgatggagggactcatttttgcaataaacagttttcaagtttgcttgccaaatatggagtcaatcacagagttgccacaccatatcatcctcaaacaggtgggcaagtagaaatttctaacagagagctgaagaggattctagagaagacagttgggaattttaggaaagattgggccaagaagcttgatgatgcactttgggcatataggaccgcattcaaaacaccaataggtatgtcaccattccaactggtgtatggtaagtcttgtcatctccctattgaattagaacataaggctatgtgggctacaaaatttttaaactttgaactctctaaagctaatgataaaagattgttacaattaaatgagcttgatgagttcagcttagctgcatatgagaatgctaggatttataaggagaagactaagagatggcatgataataagattcgcccgaaagaatttgagccaggacaacaggtactactatacaattctcccctgaggctttttccaagtaagttaaaatcccgttggtctggtccattcattgtgtgaaagatatatccatatggaatagtggagatttctccattagataatgacaggtcttttaaggttaatggatacaggttgaagctctattttggagggcaagtggatagaaatacagtttctattccactaaattcgcttgaggcttaaaagagtggtgcgtcaggctcgtgacattaaacaagcgctaattgggaggcaacccaagaattttgagtcttttaatttattttaatattgttgagtcataattgttttagttttaggagtattgattgaactttcaccatctatcttttgtttttatctttacttttctatttttgctgatttacacttgttttggtttatgttcagactgatgtttcacctatgtctatgattcctcaaataatgcatacatgtgtgaatataaagtttctgtttgtttattgttagggacaacaattttctaaatctgggaattatgatgttatttgaagaatcacattgaatcacattcaaagagacaaaggatgtctaatagaaattttgatttttcaatttaattgttaggttcattaaggtttaaattttagtaattgttttaaataaaatgtctaggagtacatcttattcatctcagatttagagttgctaattcggtagtcaaattgaattttgtttttggaagcatgtatgaaatgagtatagcatagaattacataggacatgattggaattatgctagtttttgttattaaagtacattgtgaaaaagaataggatacttgataggaaatcaaaagaatctagcctatacaaaaaatttccttttcagagtgacctcactgtgaataatactctagaactttctttgtttctctacaatatttgcatattttgatatgataaaggcattttattcttttaagccaaggacaaattaccttaccttaacagtttccattgctaacccctttgagcctaagccttttccattcattaaactgatgtttaaaccatattccttgactaccttatttgagattggaggaagaaagaattagaatcaagttcactagatattgaaagatagaaaaaaaaattaaaaaaataaatgtctataggaaattcaagaagaggcaagaaagggaagcaagaaaaaaataaagacatatgtatataaatatatacataaaaaaaggaaaaaagagaaaaagaaaataaaagagaaagaatatgtatagatgtagacatgagagtaagataagtattatattgatcaagtggacttgaataattctaatagaatccaatctcaaacttggccactgttaggaattttacggcaagcgcaccgtgttatcgttgcaagttacaaaatttataaagttcgtctccacagagatttgtgcttactttggctagtttaaatctttaccagtttagtagtctatgtacagatgataaaagtgaaggttcatttgtgtgatttgttatcataaaataatgataaaattacggaagtaaataaacgaattcaagtcaaagaagtgtaggattgaatttcatcttacttatcccttcgattaattctacctatgcattatttttctattcttaatgacgcacacgtttaagtaaccttaattcgattcctcgcaattaaagtcctaaggatattttactaaatatcgattccttacatatttaattaaatacccaagcattaagattatattcatgtgtttaatgtgatcaaaacgttatgccctattcctagcaacgtaacgtaatgagtaaattcattcagttcaaaccctaaaaagattactttccagtctcacttaggatttaagttcatgatacaagtgatcaagtagaatcaagcattaagcgccgaatgaaattaccaacaagaaatagaacaatgcataaatagaaattaaaagagcatagggataagaagagtacgtccaatccttagagagtttaggcgttcatcggaagaacctcctcaagagaatgactgacgaagtagcttgtcatagatcctcttttcggcaaagtctccactacaaaacctcactttctcactttcctaactctctactataacctagaagtattcctaagcctaaaacatgtattaagtagctaaaatggtacctagaaacatccatgttttacaaatccttggggtatttataagatattgcctcctgcctgctttgatcgcccaggcgagtggtttcttcacattttggtcgcctaggcgagctaacccttatccccttggaacttgcagctcgtctgggcgagcaaaatacacatggtttggtcgcctgggcgagttaaagtcttagtgctgaaaaaagctttgggccatgtcggtttttgggcctgaaatgcttgttgcaccctcctttcttgctatgttagtctttcttgcttgatttgattatccgaaagcctcgaaaatccacgtaatctatcaaaatataaaacatgattggattaatcttacaaaacaacttaaaaacaagtactagatgctatttaactaggtttagggaaatttataagctaagttaatgaaatcaaaagataagtgccagtatttgaaatatgaattttattgaaatgtggcacttatcagccactatccaaaatattcctacccctacgtcaggccaagttacaaccttataaagaccttttgatcaagttgtgcatgtatttatgtttctcattttcaggaacttgagaatataatcaagcctatggtagtattatagctgtggaggaattgagagattataaacccaaaacacttgagtgatgagtgaattatatatcttggtgaggggtattcaagttaagattctatgttgaccaaattgaaaagtattcttgaatttttcagatggaattcattcatatttgacaaagtaattctgagattgtttatgtgatgacatgtttaattgttgattcttgcttcttattctgaacttttgtttattgccgaggacagcaatatctaaatctgggaattatttgatatgcttctagcatttaatagttttaggctaaaataataaataattcaatcataatttatcaataaaggttaggataagtttaaatttcatcaattcatggtccattacttattttatgcatatttatttaataggaatcaagaaaagaaggaaagaagcaaaaccaagaaatatttgtcacaaaaatagaattccagaaagggtttagttaccctaattaactatatggacatggaaaaataaatagaaggcacttttggacagaaaaaaacacatagaaacacaaaagagaaggtggaggaagaatcaaagctagtaggaaaggattgaatcaacattggaagcaattatttctcctgttgtcttgagattctttgtctagttacatgttattcatgtgtttaaggttagttatgagcatgtctggctaactccccttattgtggttagggccaaaaactgatgtgaactcctctgtattaaattggtattgaaattaatgttatgattgttttattctatcttatgcttatattgcttccacctccatagaattgatcactctattagggttctaagggatgttggaactctgatttctgatagtggtagaataatagttgttacattacctagggatagggatgggcaattacaaaataattgatgtattttcctaatgcttaacttaataaggaattactaagaattaggatttcgagttggttaaagggttaaattactaagggattaggatttaactaaattatatcaaatagatcctctgagcaattataacaattgaaatcaatcaccaatttgcatatagaaggtagggatcagaagtagaggtgctctgaccacaattatttctcaccactgcgtaacatttaattaaaacttattttttaattctcgttaattttctattcagttatttaattttcgtaattctaaaatccaatcatattctcttcagaacatattatttgtcttccaattttaagataataagttgcgataaaatttgtgtctcaatccctgtggagacaatacttaacttactcactttattacttggaacgaacggtgcactttccgttttgcaacagcacccttctctttgtcttgatccttttctccacttgagatcatgttggatctgttgagcgatttctgtaatgccttgaaatttcgataactgaaagtagatgtttgatgcatttcttgtgttatttgattgttgattagtttagattatttgaaatgttatgtggattatccatgtgcaattgcttggtgtagatttcaagttatgaggagtttgtttgagccgcgttgaattgtgtgattccgagtttgacctgaaaaccttttttagtaaaatcaccattctagattggttaactgttggatctgcttaaaattttacaagcgagttcctaacccaaatatgtaacttttgacggttgggattatcaaaataatgcttgtagtgtgagaaattaatttttcactgaagcaaaaattctagaatttggttagctcacccaggcaaattttgcagacacttttgctcgtctaggtgagtgaaggcagtcataaataatgcagcagcgttccaaaccacgaaaatctgcatccttattcctcccaacagccaacccaccttccaccaccatcctccaccacccaagaccaccggtgaccaccacggaccgtcattgcttgccacaagaccactacatagagaggaacactttaatcgaagcagaatctttgaaaatcttctcaaagtttcggtagagaacatagcctccaatcctcctttcttggtttccttgaggtaatcttggtttccttaatgtaatcttggtttcctttgtcttcttctagctagtttaagcctctcttgatatctcttgtgattcgggtaccgttattgactgtttctatattttctttgaaaactctttgaaaatgagatgttgtaaaagtctcttttttatgaaactgatgtcatttctgtgatcattgttgaaccttggtcacattggtgtaatcataatttcaaaatgatgtcttttgatgtggactcctaaaacaccattttagtctctttttaaatttaagtgggtatttgaccccgaatgctaacgttagccttatttataaaatctatactaaattatcttcaatttggtatatagagctccgcgtttgggccaaaacatgtgaacttgagagatcccaaaatgacgtttcaaggagctaacaaagggatatagataggtaaggggagtttattatttagttatagttttgataccatagttgggggtcagggagtccaactatgaaagtaactgtttgtccttgttttgtgctgattttcaagaaaaactacgtttttaactaatgagatgcgatgtatttatgattgatgtgtgtttttcctgtgtgtgctcgttttcaagaaaaattgtttttaactaatgggatgaaatgaattggcttgttgatggataaaacagtgaatgatattattattgtgatgattggatttttgggaaaagtcttaattacagaggagactctgcccaaaattttatgatatgttttcctatttaagtctttattaaaattttaaatgggcataagagtgtgttttctatattgtagtcctcctctttaatatagaattttcctaaaatatcagtctcgtggtaatatggattatggatgaatgaggtgatattaatgtcattgataatgttgaaatgagatgttattgatgtgttggtgatgatgtgtttgataatgtataaatgagataatgttgatgtagttgatgatgttcagatgagataatattgatatgcatgatgatgatattgagatgatatgatgttgaggttaataatgacattgatgagagatattgctgatgtgaacaatgtcattgtgtgtggatatacatggatacccatgagggtgtatgacgggttacccttacgaggaaggatttgttcctagccaggtcatacattgatggtgcccatggttgtaggttgtgtatgtacacgtgggatgcaatgaccggttggttacccttgcgaggatggatttgttcctagccacggtcagtgcatcggtgagcccacattagtgtgttacgtatgtacatgggggtgcatgtcaggttgcccttgctaggaaggatttgttcctagcagggtcatgcattgatgatgcccatgtttcatacttcatttgcatggatggccctgataggcagtgaaccatttttcctacgagagactatttctgggatatggtaccacattgcatgctgatagatgagtcaggtgcatgcatcattctatgtatgattgtttgagttgtgaaatgtattggatgattggtttgttgagtttgtattggaatcatggatttttgttaatgattatggtgggtaatgttgtttccttcccaattactgctatctaatatttgttggttttatataataaacttacccttgcatttgttgttccttgtggttggtacctgtaatgatcgtgaacttttgtttgtgagagcagatgagcagcagtaggtgaccttggagggagattctttttgttggagccgccaagccgacgtgatgacgttgaaattctttttggaaaagagttgtgttttattaatcaactctttcttaattagttcttagcttctttttgttggtaatgtaagattccaagtgtaaatatatgtaaaatcaaattaagtgttgatatgtaaatgatatgtactggttcaatatatgcatacatgtgtattcaattatgtaattgtatcgtgtgtataataatggtattattgcaaaaaaaatttactaccattttcataatcaaattaatggatttttcatattaaaattgaaattgcacgatctagagttggtgatatcgtggcaacgaggtgggtcgttacaacttctattgccaacgcctcttcattgacattggcttcttgcaatgacaacacctctttagatctgctttgttcctataagcgaaatgcctcatccatggcggcatggatttagatttggaacctccatttgtctcactctcagagaagaaaacaacacaataaagagaacaaggtcgcagtgcgtcactatcttagattcgtaaccttctggtgtttgaagattgtcggcaacagccactacgactaccttaaatccattggaagcccgaggataggtttgggggaattgtttggattttttaatgtattattttaatttttcatttattattttgattcatttgttggatgagaactattgttgtttggacaagatttgattttcatctgttattcttccttttcatcttcagtttgttgccttccctctcaaatctgttacatgataggtcgatagccattttagaaaattatgtttttgaaagcagcgaggttcttcatgaatcttctttaatccattcttacactgtggagattctaactgcatctctagtgctagatcttggcaagaatcgattttgagtgcaagatccatctccaagattctccattaaagatgtctaaggtgtgtgtttagaattcagttgagtttaactcaatgtcactcaatctctagacagagtttttcttttcaacttttacatttgtttcttctttttgtacctatagttattgttatgttttttctttctcaggttgttaagcgttttcaagaattggttgttaagcattttcaagaattatttgctcagaccaagtataaggaagctatagggcttgctacacaatcgccacaaggagtacttcgtagtccaaacactgttgctaaatttcaggtatttatgcatcacacatactgatccattcatatttcttggtcttgttaagtcaatgcattcagtttaggttgtacctaatgactaccacattaatgtgttaatatgttgtctatctcaagttcttgagttgcctttgttaattttctttcagagtgtacctgtgcaagttgggcacactccactgctattgtaatactttggaactctgttaccatggaaaactcaatacttttgagtcactgaactgtcactgcttgttgtaaatataacaaaaaaaaaatctcttggaaaattggctagcagaggataaacttgaatgtagtgaggagcttggtcttatgaaggtcctagtagaaatttaaatttctttctctttttcatatgaacttatttattagttttatttcatgaacagtttaagcctttggggaaggaaaatccaaattgtcaattccttttaacgaaactcattctctgttcccttatttgtgttttgcacttcaatcctttattttttttccccaatttttatgaggcttgcatataatgcagacagtggattatgaccttgcattgaaaatttatatccaagctagagccacatcgaaagttgttgcaacttttgcagagaggggggaattttgataagatcctaatatattctaagctggcatttttttagtttagtagaatcataaacatgttggtgttgtgattaaaatgttttactagaacatgatttacaaactactaaggaatattctaagtagttggtgttgatgcatgcattaaactctttgagcaattcaaatcctatgaaggactatactttttcttgggtgcatacttgagctctaggtatttctttcttattggagaatgaacatgacctcagttccctagttggtctgcttcactattttttttttaattattgtaatttttttttattctgtcttgtaaagtaaggatcctaatatattcacttcaagtacattgaggccactgctaaaactggacaaattaaggaggtagagcgtgtagctagagaatcaaacttttatgatgcggagaagacaaaattttcttatggaggccaagcttccaggtgcgcatccattgattaatgtgtgtgatcattttggctttgttctggatctcacccactatctttatactagaggagttatgttcaaaaggcaactttgtgtttcattgtatttgatttttgtgatccttgagcatatgggtttgcttcaaatcattcttggacagttttaaaaccatgacctaaactttgaacttcttgcttttaggttaatcccgaaaatgctcctctagtagtaagacagttattagatgatgaatgccctgaagattttattaaaggtcttatactttcagtttgttctctcttgctagttgagcctttagttgaagaatgtgagaagaggtgtgctagttttctctatatctttcatctccattatcattgccatgttcatttctcatttaatgttcaagctgttaatgtcttgttggataaccttcagactattgatcatgctgtggagtttgctttttgggttgaagaagatgttgtttagagctaggtggctaaaacaaaacttagagaaggcttagtgagtgatgcaattgagtcattcattcgtatagatgattgaactcatttcttagaggttataaaggctgctgaagatgaagatgtatacatacctggaatataaacatttaaaacttgtaatataaacatttaaaacttgttattatactagatttagatctagatgattttctaacaactttctagtatgcattcgatgttcactgatcagtaattaaaatctaggttcttgcttgtattattttatcatgtagctacttgctgatgtagtgattaattctttgatttgcaacaaacaacattgatgttgaaagtcatatcaacatcggtttcttcagaaaccaatgtagaaaacgctccagaatacacaatattgaccacatttctacatcagtttaagccaggattaatatagataatgattttcaacatcaatttttattcgattttaaaaaccgatgtggaaagtgctaattttcaacaacgacagttccaacatcgattttaaaatcaatgttgaaactcctaaataaccaatgttaaagctcttttatgtaaaggtggcgggctaggatttcttaggtccaatccagccctacatcgagctactgggccactgaatctattgagactaatttagcaatgaataacaaaaaataaagattctatgttaaaaaaatataaaaggaaaaaaatatattcgggccatgattttacaataatatctacccaggaaaaaatatatggattaaaaaggagagaaaggtaagaaagtatatatatggataaaggggcatacaaagtctagattcaatttttagattatcatattcgttatacttaagaatcaaacaaatacaatttcttaatatttaataatagtaatatgccaatcaattaagtctagagccaattacaaattatcatttaatgtaattataaatttaattttttaaaaaattagatttcaaaaacttagaacattttttcacatttttctacccaaaataagagcactttttagacaatttcttttaagttatttgttttatatatacttaaaaaaacatattaatcttttccggcatattaagataagaaagtcgtgctacattttttgggcccaaataagatactttagatatttttttatatttattttattttcattatattaattagtttgatgtttaataaaaaaataaattttaaatgcaaatttataattaagtaataaggattgaatatttgaattcatgcactcattaattaattgttatgcattcatttaaaatatgaaattttaaaaattttataatataaatttaaaacattttgacccagtctttgctgcccaatttttttatttaatgaataatattttatattttataatatatttaagtaagaattttttatcattcctcccacctccaaaaaaacacaaaaggtgctttagaaaaaaaaatagttatttttttaaaatttacatacattaataaattatgttaattagttggatatttaatagaaagtgaattttaaattcatatttattattaagtatcataggaaagatagtgaaatttaatggtatcattcatttattgcatatttaatagaaaaatcaatttaaatgcacatttattatttagtgacgagggaagaatagtcaaagttaatgctttctttaattaatatttgtatatttgaattgattcattcattaattggatatttaatatgatagtgaattttaaatgcacatttactattaaatgttgaaggaagaataataatatttaaaagagtcattcattaattaaatatttaacaaaaaatattttaaatgcatatttattattaagtattgagggaataatagttgaattttaataatgtcattaattaatatttgaatgcatacattcatttagtataattataaagtaagaagcttttttcgcactttttctacccaaaataaaagcactttttagataatttttttttagttattttattttatatttatttaataaaatatattaatcttttctaacatactaagataagaaagttgtgcaacattttatgggcccacataatttgcttatagacattttgttatagttattttatttttatttatttaataaatttaattaattagttggaaatttaatagaatttgattttaaagaaacacttattcttaaatattaaacagaaaaaaaactttatggtgttattaatgaatattcaaattcatgcattcattaattgggtattatgaattcattattatatttataatttaaattttaaaaaatttaaattttaggtttatttttttataatatatagtaagaacattttgacatttttttttctgcccaaaacaaggtggatttttggatacctttttctaattattatgttatatttatatagtaaataatattttattttataatatatttagttaagaaagttttggatcattcctacccccaccccccaaaaaataacaaataagatgttttacaatttttttttggttattttagttaaaatttaattatagtaataaattatattaattagttaaatatttaataaaaagtggattttaaacttttatttattattaagtttgtcattcattaattacatatttaatagaaaattaattttaaatgctcatttattatttagtattgaggggaggatagttaattttaatgctttcatttactaatattttaatattgaatttattcatttattaattgaatatttaaggagatgtagattttcaatgcacatttattttcaattgttgaagaaagaataataaaatttaaaggggacattccttaactggatatttaaaatgcatatttattattaagtattgggtgaaatgtggtggattttaatggtgtaattaattaatatttgaattctacattcatttaatataattataaattaaattttaaaaaataagatttaaaaatgtttttcaataaatattaataaaaattttctcactatttctacccaaaataagagcactttagacaaaagtaaaattaaagttattttattttatatttatttaaaaaataatatcaatttttttaccatattaaggtaagaaagttgtgccacattttttgggcccaaataaagtgttttagacattttgtcatagttattttatttttcatttatttaataaattcaatttattaattgtagatttaataaaaaggtatattttaaaggcttatttacaattaagtattaaattgaaagataaagaattttaatgatgtcattaatgaatatcaaattcatgcattcattaattgggtgttatgaattcatttactatatttataatttaatttttttttaaaaagttaatttctaaattaaaaatattttataatatatagtaagaacattttgactttctttttcctgtccaatataagggataaatatttttaattatactaatttatatttatataataaataatattttgatttcataatatatttagttaagaaaccttcaaatcattcctatcctgacccccaaaaaaataaaaaataaggtgctttagttttttttatagttattttagttaacatttacttatagtaataaattatattaattagttaaatatttaatataaagtgaattttcaatgcacatttattattaagtatcaaaggaaagatagtgaaatttaatgttgtcattcatttattgtatatttaatagaaaattaaatttaaatgcacatttattattcatcaatgagggaagtataatcaaatttaatgctttcattaattaatatttttacatttgaattgattcgttcattaattggatattttataagatattgattttaaatgcacatttactattaagtatggaagaagaataataaaatttagaggagtcattcatttattaaatattcaataaaattttatttttaatgcatacttattattaagttttgaaggagtaatagttgattttaatggtgtcattaattaatatttggatgcatacattcatttagtgtaattataaatttaattttaaaattcagattttaaaaactttttaagtacaaagtaagaaactttttcacactttttccatccaaaataaaagtacttttttgataatttcttttgaattattttattttatatttatttaataaaacatattaatcttttctaacatactaagataagaaagttgtgtaacttttttgggcccaaataagatgctttagacatatttttatagttattttttattttgatttatttaataaatttaattaattagttaaacatttaatagaaatttgattataaacactcacttattattcagtattaaagaaaaagataaagaattttaacgatggtattaacgaatattcaaattcatgcattcattaattgagtattttgaattcatttattatatttataatgtaaattttaaaaaatttaaattttagatttaatttttttatataatatataggaagaatattttgacttattttttctacctaaaataagggagatttttggatatattttttcttaattatgttttgttatatttatatagtaaatagtatttttattttctaatatatttagttacgaaagttttggattattcctaacccacccccgcataaaataacaaatacggtgttttagacattttttagttattttagttaacatttaattacaaattatattaattaattaaatatttaatagaaagtacattttaaatgcttgtttattgttaagtattggaggaaagatagtgaaatttaatggtgtcattcactaattacatatttaataaaaaatttaaattaaaatgcacatttattaattagtattgagggaaggatagttaattttaatgattttcttcaatattgaattgattcattcattaattgaatatttaagaagatgtagatattcaatgcacatttattttaaaataatgaagaaagaataacaaaatttaaaggcgacattcattaagtggaaattttaaaaaatattttaaatgcatatttattattaagtatatagagaaatgtggtggattttaatggtgcaattaattaatacttgaattctacgtgcatttaatgtaattataaatttaatttttaaaaaaccagatttgaaaatctttttaatacaaattaagaaacttttttcacactttttctaccaaaattaaaatcactttttagataatttatttttagttattttattttatatttatttaataaaacatattaatcttttctaacagactaagataagaaagtcgtgcaacaatttttggacccaaataaggtgtttagtgtaacatccttccaattactatattatgtttaggtcataatacgtaactagaagatgttaacttttctaacgtaaaatttttaaccaaaattggttaaaaaaaatttatctcaatattagaaaattatgtttatattgagcctgtagagactttttggtctctttaataaattacaacttagtaataacttgtaaataatattccctataatagtagtaatgtctatatattacaaaatgctacaagtccacgacattaaaagaaatctttcaacttgtcctcactttgtagctccttttttcgatttacctgtctggaatgacacgggaacatactaaaacagtgagaattccaaagaattcccaataaatgaaaatttgcttatcatacagtgtcaccgtcatcattccagctacttcggtttattaagaaaacatgtgaacaattatagttgatttttaatttcataaacatataacctgaagtagattcattttattcacaaacacttaaaaataatctcatacttcatcattaatgcaagcatcattttcaatcatgtcaatgtatagtttacctttattattttactctttaataccctaaactagacaatgagctcattactagacttaggttgctcccgtagggtcgtgctcagctcaactgtatcaccctttggggtcccatagggtgtgctcagcttaactgtatcacccttgggtcaatatgtctttctcggagggtcgtgctcggcttaaccgtatcacccgttgggtaccatcagggtcgtgctcagcttaactatatcacccttcaggtattatctttctttagtctttccctcagggtcgtgctcggcttaaccgtatcaccctttgggcaccatcagggtcgtgctcggcttaaccgtatcacccttcaggtcttatctttttatctttcttaatgcacatgacatgcttaatgacatgcaaagatacataactcatttcatacaattatgccacaaaacatcaagattttcctcatcataaaagaaaatgataacaacaagatttcttactacatatgattcgggtcttcctataatctatactcatataatagtcattaaatccatatcttttaatatgttaaactagacttactaagctttctaaaaaggtatcacatgcctcaattgaagttataaaactctagatataatattttacaaatagaacttcaaatctaccaacaatatcaaaattctacactaacatctcctagtgtcttcacgatttcaagcagtaaaaatctagttttagctgaaatttttatatattatatattatatcttacatctatatctttaattccatatatttatacacctaatttgaataagaaatgagagagaaataaattttttaaaacatatggctgaagctgtttgggtgtgaacagtttcggacagcttgagctaaaataatttctgggcatgattcactacttattttggtcccatattttataaaaacatagaggacatcttaagctttaaaatgagtggtcaaaaatctcgtttggttaagtatagaggaagatatggaaatttcaaaacagtctaaaattcagcttacagccatacgaattatctcaagaatcaaatgataaatgaaactaactttcactacctcaaatgagtttaaatcttgaaaatagaatggatagatgacttccttccttccttccttggaagaatcctataagagatgaagccttgatatccttcttctaagcttgtcaaaactcttcctaaggttgctaggtttctcacgaaattttgtcaagatggtggagtttctttcttacttgttttaggctttgaaaagagaaagatgaaaatgaaatggaaaggattcaagggagggtttcacgtgagagaaataggtgtaggaagtatcttgaaaatgaattccattcaaagccttcatcctttatatagtagttggaagctaaaaaatctcctaagtcattatggccttactttccaagtggccaaatcataaaggctattgattctactccatccaagtgtcctaactcttgaaggttctcaataattctccttccttcttgtattttcgtggagtagcttgccaatgaaggtttttatgttttttcttacattcttgagtttatcccaaacctgttttagtaaaattctaattctggatttgttaaccgttggatctatgtgaaattttaaagatacactactatctcaaatatttaacttttgaccgttgggattgttgaaataatgtctatagctgtccacgtacaagatggaagaatgtagagaaatcttggcttgatttttatgttaccttgcatccatgccatacaagtgtcttgccacttgttttcatcctatggcttatcttccaagtggctaaattcaagaagattcttcctcattctccatgcttctccatgtgaatgacaagctcaaagggaaggaatacaaatttttcttcctttcatgctatatgtggtcattttttgatgatgaataaaaatctagtttcaatatggtattttcttaaaaagaaatccaatttaatttgaattcttttatctaaagaaaattttgaatattataattctagatgttcctaagaatttatcccaatgatagtttgaattaatcctaagcagtcttatacaggccaatacataaacctttcattctaaactacatctttatgttattttttatttggtctatacttcttctgaccatcaaaattactaaaccattttattaaataggtctattcatcctataattaagagaaagttctatagattttatgtagcattttttggcaaaagaaccaaaatagtattttttttaataaatatttaccgataaggggcgctttcaaaattatttaccaaaatggggcagtgtaacatgcctgaattaggcatgttacaactgccccaatttggtaaataaggcccacccgctccacagttccttcatatcttggcttccagtgttctctgtctttgctaaattgtcaaccattttggtgttttttggttttttcagagatttttgaagttgttttgagtgacgagaagcttgagttcaagtggtgattctgtttgcgtttgagggattagggtttgctgggcatggttaggttgtgtttagggtatggtcatgtgatgatagtttgtggttaagggtttaggatttggtgggcatgggacgtgacgtttgggctagggttggggtagggttagctttcatggtcatgtgacgatggtttgcaattaatggtttagggtttggtgggcatggtatgtgacgtttgggccagggttggggtagggttaggtttcatggtcatgtgtcgatggtttgcggttaatggtttagggtttggtgggcatggtatgtgacatttgggctagggttggggtagggttggtttcatgattttggttttaacttggcaaactacttcaccttcttcatcagctcatgctcatagtcctcagagtaaccctttaatccccgcaaactgctttcaacaacttggcaaaacgaatgcagcaaagcacttgttacaactgtgatcagtgaggacggtggtgttagtgttgtccttccaaatgccccaaaaccaaacatttctcacctagaaaagattcaactattccctctaataggaacatacagttcccttgtggccatgactcatgcggaatgaactcacgatatggtaaggactactattcctgccccatcaacctaaccaacatcaacagtaaatcattaaccattaacctgaaccccccaaaccctaaaagcatgaacctcgacatacattgtttcgactagtgccaattccatcatcatatacatagataagaagcaaaacacaacaagaaaaaatcacacgaccctgttatcgaggaattagggacttgactaacccggggagtcgaataaagtcacgggttaaaatgagtttttcattagttgtttccacttgtggcaagtccatcatcatatacacagcaccaatcacactcttcactcttcagtctgcattgagaagaagcaaaacacaacaagaaagaaaacgtctgatcatgtctttctcccattcaccttcttcatcagctcatgctcatagtcctcagagtaaccctttaatccccacaaactgctctcaacaacttggcaaacaaatgcaacaaataacttgtccttaaaccctataccctaaatccaaaccatttaacacaaaccctagccatttaaaccaacatacacctaacccataaacccacacaccttaaacactaaaccattaatctcaaccccccaaaccctaaaaacatgaacctcgacgtacattgtttccacttgtgccaagtccatcatcatatacacagataagaagcaaaacacaacaagaaaaaatcacgctgaccatgttatcgaggaattagggacttgactgacctcgggagtcgaataaagtcacgggttatcatttggccctgcgtttcgatctatcatatgtctagtgtcatttctgacaacttcgtgaactagacaaggacaaaaacatagacacaacaccaatcactctattgactcttcactctgcattgagaagaagcaaaacacaacacattaagaaaacgtgtgatcatgtctttctcccatccaataggaacatacagtgcccttgtggctatggctcttgcgaaattaactcacgctatggcaaggactactatgccatccccatcaacctaaccaacatctacagttaatcattaaccataaaccctaacaccctgtatacatgcccactaaaaccataaaccctaaaccctaccccctgcataccccctacaaccatggaccgccaatcctaaaccctatacccaaattccaaaccatttaacacaaaccctaaaccctttaaaccaccaacatacacctaacccataaacccacacaccctaaaagcaagaacctcgatgtacattgtttccagtagtgtcaagtccatcatcatatacacagagtttggctggggtttagggtttggctatggtcttgggtttagggtttatggtttggctggggtttagggtttggctatggtcttgggtttagggtttatggtttggctggggtttagggtttgggtttagggtttagggtttagggtttggctagggtcttgggtttagggtttagggtttggctagggtttagggattggttggggtttaggggctgggtattcgggtgaggggttagggttgtgttggcaggcgtacatggtgtttggggtttaaggctttgtgttgagtttagggtttggttggggtttagggtttggttgggatgtagggtttggtttagggtttggctgtggtttagggttgtgtcggcatacgtacatggtgtttagggttagggtttaagttgatttctttttagttactttttagatagataattataaacgttaagtgattcattttttggtaagaatttgtgttgctaggggtttagggttgtgtgcctttggcatttgccattgttgagggggagacactggaagcttggaattacttcctttctaacattcgcttccacgttactcgcatgcaaaatagtttagtcgcatgataatgtatgcatttgtggggaccccaaacctagcccaaacatcacataccatgcccaccaaaccctaaaccattaactgcaaaccatcgtcacatgaccatgaaagctaaccctaccccaaccctggcccaaacgtcacgtcccatgcccaccaaacccttaaccacaaactatcgtcacatgaccataccctaaacacaacctaaccatgcccagcaaaccctaatccctcaaacacgaacagaatcaccacttgaactcatgcttctcgtcactcaaaatacttcaaaaatctctgaaaaaaccaaaaaacaccagaatggttggcagtttagcagagacagagaacactggaagccaagatatgaaggaactgcggagcgggggggccttatttaccaaattggggcagttgtaacatgcctgaattaggcatgttacaacacgcccaatctaggcgtgttgtaacatgcctaattcaggcatgttacactgtcccattttggtaaataattttgaaagcgcccattatcggtaaatatttattaaaaaaatactattttggttcttttgccagcatttttccatatttttctgatgcttgagttttcttgaatacaacctcaaagttgtcattttctaaaatttgtataaattttattctagagttttgtgtcacaaaatatgttgatacttagtcagctaagtgtattctataatttcatcaagtttctacaaaatttctaaagttatttgagcatttttggcctagggacattttggtaattatgccattcaacctaggggtattttggtcatttttaaaaaaatgtccaagggcatttttgtagttttcatcttaagggttttctagtaatttctacttcaagaaaagagtgatatactcattttatatttgtattataatatcatcacatttacataaattaattataactattgaatataatttttgaggatgttacatttagacattttgttataattattttattttcatttatttaataaatttaattattagttgaacatttaatagaaatgtgattttaaacacacacttataattaaatattaaaaagaaagataaagaattttaatgttgttattaacaaatattcaaattcacacattcattaattgagtattatgaattcatttattatatttataatctcaatttttcaaaaatttaatttgagatttcaattatttttataatatataatacgaacattttgaagatttttttcctgcccaaaataagggggatttttggataattttttataattatgttatgttatatttatttagtaaataatatttttattttataatatgtttagttaagaacattttggatcactcctgtcccacccccaaaaaaattacaaataaggtgttttagacattgttttagttatattagttaacatttaattataataataaattttattaattacatatttaatagaaaattaattataaatgcacatttattatttagtattaagggaaggatagttaattttaatgctttcatttactaatatttgattattaaattcattaattcattaattgaataattaagaagaagtagattttcaaagcacaattattttgaagtattgaagaaggaataataaaatttaaagcgacattcattaattggataattaaatattattttaaatgcatatttattattaactattgggagaactgtggtggattttaatggtgcgattaattaatatttgaattgtacatttatttaataaaaattaagaacattttttacactatatctatccaaaataagagcactttttaggaaatttatttattaagttattttattttatatttatttaataaatcatattaatattttttagcatattaagataagaaagttgtgcccaaataaggtgctgtaaacattttgttatatttattttatttttcatttattaataattatattgattaattgaacatttaataaaaaaagatgatttaaaatgaatattgttaattaagtattaagggaaagataattggtttcagtgatgtcattgaatatttgaatgcatgcatttattagttagtctttatgcattcatttattatatttataattttatttttttaaaatttaaatatcagatttaaaaaatgttttataatataaagtaagaacattttgacgttctttgtcctgtccaaaataaatatgctttttcggataatttatttttaattatgttattttatatttagttaataattaatatttttattttataatatatcatgtaagaaagttttggatgattcctctccattgcccaaaaaaataacaaatatggtgttttggacatttttttagttattttagttaacatttacttatagtaataaattatattaattagttggatatttaatagaaagtgcatttcaaatactcgtttattattaagtattggaggaaagatagtgaaatttgatcgggtcattcattaattgcatatttaatagaaaattagttttaatgtcttcatttactaatatttgaatattgaattgattcattcattaattggatattgaagaatatgttgattttaaataccgatttattttctaattattgaagaaagaatatgaaatttaaaggaatattcgttaataggatatttaataaaaaaattattctaaatgcacatttattattaagtattggagaaaaaagtggtggattttaatggtgtaattaattaatatttgaattctatattcatttaatgtaattataaatttaattttaaagaaaaatcagatttaaaatctttttactaaataataaaaatattttttcacactatttttaccctagagcactttttagaaaatttctttaatttattttattttatatttatttaataaataatattaatcttttttaatatattaagataacaaagttgtgtcacatgttttgggcccagataaagtgctttatacattttattataattattctatttttatttatttaataaattatattaattaattggacatttaataaaaaaattagattttaaatgcatatttaaaattaagtattaaggaaaagataattggtactagtgatgtcattgatatttgaatgcacgtatttattaattggtcattatgcattcaactattatattgagggaaggataattaattttaatactttcatttactaatatttgaatattgaattgattcatacattaattgaatatttaagaaaacgtagattttaaatgcacattttttattgaagaaaaaataataaaatttaaaggcgacattcgttaactgaatatttaaaaaaattaatttaaatgcatatttatttttaagtattgggtgaatggtgtggattttaatggtgcaattaattaatatttgaattctacgttcatttaatgtaattataaatttaatattttaaattttttagtaaaaataaagaatttttttcacagcttttctaccaaaaataagagcattttctagaattttttttttgggttaatttattttatatttatttaataactcatattaatctttattgacatattaagataagaaagttgtgccacatttttttgcccaaataaggtgctttagacattttgttatagttatgttatttttcatttatttaataattatattaattaattggacatttaataaaaaaagtaaattttaaatgcatatttaaaattaagtattaagggaaagataattggttttaatgatgtcattgaatatttaaatatgtgcatttattaatcggtcgttatgcatttatttattatatttctaattttaagtttttaaaatttaaatatcataattaaaattaatggcacttttttggataatttatttttaattatgttatttatatttattgaataaataatatttttattttataatatatttatgtaagaaagttttggatcaatcgtccctccacttcccaaaaaaaataacaaataaggtgttttggatatttttttagttattttagttatcatgtacttacggtaataaattatattaattaattgaatatttaattgaaagtgcaatttaaatgctcatttattattaaatattagaggaaagatcatgaaatttaatgttgtgattcattaattgcatatttaagatatgaaagataatgagttggacaattaataaaaaaattcaattttaaatgcacatttataattaagtagtaagggaaagataatgagttttaatgatgtcattgaatatttgaatttatgtattcattaattggttgttatgcattcatttatgctattttataattttaaattttataaattaaatgtcatatttaaaaatattttataatataaactaaaaacattttgactaagtttgcttctctaaaacaagggtgatatttcatataacttgtttttaattatgttattttatatttatttaataaatatttatattttataatatattctggtaagaaattttttgatcattcctcccacactccaaaaaaaaaaaaaaacaaataaggtgcttttgacatttttttagttagttatttaacatttacttacatgaataaattatactaattaattgaatatttaatagaaggtgaattttaaatgcatatttattattaagtattgaaggcaagatagtgaaatttaatgatgtcattcattaattgcatatttaataaaaaattaaaattatatgcacatttattattttgtaatgagggaagataaatcaattttaatggtttctttaattaatatttgaatttattcattcattaattggatatttaatgtattgaaggaagaatagtaaaatgtagaagtgtcattcattaattggatattcaataaaaagtgattttaaatgcacatttattattaagtattggggaacaatagttgattttaatggtcattttatcaaaagggggtgtttttttttttttaaattaccgattggtggtaattttcaaattatttacagaaaaggggtaagtcataaaattttttacgacttctataaatgaagtctttttacgacttatagttttctattttattgcactgaaatcgtgaattaaattacaacttctgtaatgtaatttttttaaatacgacttcaaagtcgtaaaataaaatcgtaaataaatatacgactcctttttaattttatttgaaccctatatgactttgaagtcgtattggtttttttttataggaagtcatattttattttacgacttccatatatatatatatatatatatatttgttttatggtaaagttgtataatgtcatatgactttacctttttttaaattttttttgtttacgttgatttttaagatagttttcataaatttttgtttaatttttttaatttattttgtttggtaaattttaataaaattattttattatttaagaatatactaattttaatatatttgtttgatttaatattttgtataatttttttattttgtattcaatattaacattaaaagaaaatattgttttgttttgttatttattttcattttttcattttaattgtttttttatttttattataaaaattatcttattttataattgagaaatttacaaattaatatacgtttaattaaggtattatatgattttatttgatatattttataatgtatgtatttttatgttaacatttgtatttgaaaagaattaaattaaaatttttataataatattcaattattgttaacaaaatttaatatttgacacaataatatgttaatgatttttgttaaccattatgacaatattatcaacataatataatttagtgataaaatgattgttaaaataaaaacaacatttgtaagtaatagaaatgaactatacaaattaaataaaaatataaaaactataaataatattaaccgttgacttccttgtatggacagttactatgattatgtccttcagttctacacaatgaacatttcttaggcctatttggaattggttcgtccatttcattatgtacacgagtagtggctggccttcctgatgtctgacgtcattttgaagaatcaggcataaaatatggacctacatattgaggccattggacttcgcttccaagggagtgaaagtgatgttgataaactttgtaaatgtttttcaacatatatacaggatcaacaaagtcatcgtaatttaaattgcaagaagcgcacgctgcaattgcgtgcgaacaaggaattcgaatggcctgaaattgtccagaatcacatgaccatttgttcaatttgacaatgcatgccattgctcgtcacccaagttgcgtgtttacaatttcttgaaccttaaactcccctgtttctcaaacgtacatccttacataatgtgaggttgcaatgtgtcaatttgcttgcagcatgacagatacctcttcaaagtacctatatcctgcctctatcatggccatgattttcatgccattactaacaaatgaatcatttattttattaaatgtttcattcactaaggcagtaataggcaatgcccaagctcctttcaacattgaattcatacattcagcaaggttggtagtcatatggccataccgttttccttcatcatatgcttgaatccatttattcttgggaatctggtccaaccaatctgctgctagtggaaacttagatctcattatgagtaactttgcctcaaaccgagattttctcaactcgtatcctatggcaaaataaaaaacaataagtattaattaggttaatgcataataatataagaatttgatttatgaaatgtttagaagattacccatatttattacttgtttttttaagtcaacatccctaaactgtttgttaaaatttgaagcaatgtggcgaatgcaatagatagaagatacatccggtgtagtccacccaactctatctgatcgcaaagctgctagcaaacctgtctgaaataatacacaaattcgattggggtgtaacgtatctccttaaatgatgcaaggaccacatccaagcttctttattctcgctctcaacaattgcaaaagcaagtggaaaaatgtttctagtaccatcttgtccaatggcagtcaataaagtaccacaatattttccagttaaaaatgttccatctacttgcacaatcggcttgcaatatttaaagccttcaatgcatggcttaaaagcccagaacacacgattcagaatcaccttagaagggccatcctaaccatcttccattgaaatggatgttttgtatttaacaattgtacctggtagaaagtgttgaacaactgtcaaccatacaggcaaatgcctatatgattcttcccaacttccaaatgcaagttcaagtgctttttatttagttgtccatgcttttctgtatgtcacattataaccaaaccgttgcatcatgtttgcaatcaaggttttaatttggataccaggatttgtttttactaagtgcacaatattatgagcaataacagatgagtctaacctaagatgatcttgtgataaatgtgaagttgtgcaagtgtgaggtccagttatttttttcatcacccacctcctacgtaacttgctgaactatgctctagccctccaatgacaaccattaccatattcagtacacttaacaaaatacctatcactcttgttttcttcaacatgaaaattaaatgaatgtacaaaatgaaattcctttatggcattcacagctgcttgttttgattcaaaatgagaagaagactgactttcagtttgattgcttgcttctccagtttcgtgaaatgagtattgtttatcttcttcactaaatttgctaacattgtttctgtttattagttcttcactatccatctgtcagaaaatttgattgtaatttgttagtcaacatgtgaaggcgttaacatggtaaggagaattcaataataaaatatgaagcatattatgataaaaatacctggaaaatcgtaaggaagagattaatatcatacttgaacaatattttgttaactttttaggatggtagtgttaaatgaggaaataacaagtgttcattgaatcgcttcaaacgtggctttataataaacatgaatgagcatgaagcaacatgaatgataaatcaaatcagaaaatttccatgaatagttaaatgatttgcaattaaataagtatgacaaaaggttaatcgtgcacacttgacttccatgtacatttattgaacccctaattactgcatttttttttaaaacccaacttttgaagacccaacttactaccataatttttaaaaccctaaataatagtagttaatgatcaaaccatttacaaaaaaccctaattactgcactctattttttaaaaccctaattactacactctttttttaaaacccaacttttgaagacccaacttactaccataatttttaaaaccctaaataatagtagttaatgatcaaaccatttataaaaaaccctaattactgcactctattttttaaaaccctaattactacactcttttttttaaaacccaacttttgaagacccaacttactaccataatttttaaaaccctaaataatagtagttaatgatcaaaccatttataaaaaccctaattactgcactctatttttgaaaaccctaattactacactctttttttttaacccaacttttgaagacccaacgtaccataaattttaaaaccctaactaatattagttaatggtcaaaccatttatgaaaaaatcctaattactaaactcattttttaaaaccctaattactacacttttttttaacccaacttttgaagacttaacttaccaccataaattttaaaaccctaaccaatattagttaatggtcaaaccatttatgaaaaaaccctaattacaaaagcatatttttttaaaaccctaattactaaaatattttaaaacccatattattgttcccaatttcttaaaaggctaattattagacacatttttaaaaacgtatttgctacattttattttaaaaccatagcttaaaaaccctaattactaaagcatgtattgtttaattaatttttttggctaatgcactattcacaacacgactttaaagtcgtgtggtatgtcacgactttaaagtcgtgtggtatcctccacgacttcctctaaaatttggacaatttccttgctactttgtgaagaaatcgtggcaccccatacgacttagaagtcatgctagcctacacgactttgaagtcgtgaaaagcaatccgactttaatacaaaaggccaaaaaatattagaacagccaaatcatgcatttaagctttgaaaaaaataatggaaccattagtaaaaataatggaagaaaggacaaagccagcttgcttcctgaaataattattgaaccaagttacagtatgatatgaaatgcctattgcacatgccttggtgatagatttgattttaggctgtacatgatataaagaatggttcagagtaagttatagcataacattatatgagtttagccacgtgaaacttacactatgagatgaccattcaagatgtctatagaaaacaataatggagccacaactgtgtctaaagaaaacaataatggagccacatgatgtgaataactttgagttgagaaatgattcaacagaagttttgacatataaaaacaaaagcttcccatgtgattcttacaaaagaatatgaatgtaaagatgaaaaatcaatgaaagcatttaaagtatgaaaatgaccatacaaccttataactattgtacttttgaaagccataagcatgaatagttcatattaattttgaaagacatgccattactggaagtcacatgaattggaaagatagtaaaagttatgagattttcaatggctaaagacacataaatgaatagtatgtgactattcattgctttgaacgtggaagcaatccacaacaataatgccacatttttttaacttgctatgtaattgttgtagtataataaactatcttaatgtcattttcataagcttgttttcttactcagaagcttgctccttcatcattctcatgaaccttctattctcatatacttgctcttccattcactaacttgctctttcatcattctcacgaaccttacacaatattctccaactgcagttgtttcactctacttcttcttcttaagcaatggcaaatacccaatctggtggtcctattgatgagtttttgttgcgcttacaagaaaaccatatttcaagcttagtatggcaaggtgaagaaagaatgattcgtccgagattgcattctgtctgggctatgagacactttgatcaattagacaatcgtgtgaaaaatgcaataacagaagctagctttggtcatattatgactatcgatcaagttgatatcaaccagcatttggtaactgcgttggtggaacgttggagaacagaaactcacacgtttcattttccacatgaggaggccaccataatgttgcaagatgtggcattgcaattgggcctcaaaatcaatgaccttccattaactggtgccattattggagatgtacgtcaatgttgtgaagccttactagggcagagtccaccagacaagtatgtaaaggggaaaactctttacttaacttggctacgacaaaattttcaacaagttcctgatgatgaggatgatgttgtcattgcacaacatgctagagcccaaatcatgatgctcataggcaattctttgatgccagatacatctggcgcatgagttcattttatgtacctccttatattatcaaatttgactgaggcaagtcactatagttggggcgctgcagtattagctcccctttaccgagcactagatcgggctgtgaagcccttgcaaattgaaataggtggatgtcttttgctcctccaatcatgggcgtgggaccatattaaatgcgttgccccacagatacatgccctttctaatgaagaagtgtaagaaggacttggattaccccttgcacgcaggtggtctcgaccgatgagtgaaactaacattcctaccaattctatcagattgatatgcatgatattcgacatactacaattgcatgaggttcgattcttcctccttcatgttaaatttttgtttatgtttcctactggtaaaaacatatgtgacaatatcactcttgtgttgcagttcttgtggacacctcatgatacacctgaaataaggccattaattaataacattgaggtgtctatgatagctcgtgcaaaagtccctcttatatgtttttgcaattgtagaatgacatgcagtagatagggtcatgagacaatttggaatgcgacaacatgttctagatgacccatcaaacctggaccaactccacgaaatagatatgagagggagaacagatgtttattggcctcaccaacatcatcactggataaataaatggaatcattggaatgcttatattgttcatggtgaaatggataatggtatcttgcatgaaaattcagaatacatgcaatggtatatactgttagtatatggatgtcctagagacaatcttttcattagattaggacgtacatgtacttttcatattgtcatgaataaattataagtgctctttatcttgtttcatattttgtctcgatattattattaatatatgagtaactggataaaacccttggaatagaataggtatctcttgaatatcagtgatgggatcacgatcatgaggattcaaggataccagatgtctactcctaaatttaagttcctagtctagagacattgagaatggggatcagcgatctcgggtaagactagcacgacttatctacttgtatgcagatacaaggtaaagacctcatgagctacagacatggagatgtcttagctaaagtcgtgggtggacctataagggtatagctcgcactgaacggacccacaaagagactctatgaggaaatctcacagataatgtcattagagtagtctcttattatttgggtgtgtctttccttagactataagttttcacctagactgtgttctagaagacatgctttgattgtatacctcgtttgcctgaaacatggagacacataggtatacctttgggcatgtcctgaaagaacatgagtctagggtgactagctgaaggaattcgtcaaatctctgtgagagattaggttatctgtaagctggagaaatcgggatgacatttacgagactcgggaatctatgcatagtaaaagaaatcatgagataatttgtctttagagtcagtaaaattggagactccctattttgtatcaaagcttaccctagatcgcaagggctgatacgtttccttaccctaggttttatgggaaggtaaccgagacgaaaggaaatacacagaaaccaaatagatttaataggatgatcttgtcatttacctaactagttctggtgcaacaaagcattgctagtgctctgtgttgtcattaaatgggtagaggccatgttgggcccaaactcatttatgtcagtagctatgttgggcctaatgggtcacacactaacactttattgtcatgacattatagcattaaaggttttgggcctaataatggttgttggcccaagaaagagtttagaaacttatcttaaagagagaggggcgcatgaatggagttaatgggcttggatagtctaagacattattaattaatttaaatagttaaattaattatctaatatttaaatttgataatttaaatatttgaatttaaatacgaattaactatagtagatagtttcatatcaaaaggagaagataagagctagatttgaatttgaattcaactagcatcttatcatgatcatatcctagattttaggaagaagtttgagggctgattagaggcttatcatacggctggatatttgattattatttggcaaaataaattccaagtaattgacttggtcttaagaagataagataggaggttgttggcaatttttgaaatacatcaactctatcttttcttcacgtgtgagatgcttaatgatcagaatattatggttaaaaatctgacctaaaactcttctataaatatactcttgtgatcatagttctctaaaagaataatttttgagaaaaaccctatctatcttcctccttttcacgtgcccctttgtgtgagttttggctgaaaattcagccactaatatcatctattggtgagtctcttagataagaaaacattttaaaacctaaccttcttcctctccattggtgcgcctagcttgcctcctttggtgtttgttggtggtattcaagaagtgttcttgagtcttgacaagaagtggtgtgaatcaacattagagggcttgtatcttcaagcctattcttgatcatcaatttttgaatataaacaaggtaatatctatgtcctaaagaatgattcttgaatggtatgtgtgtttccgctttgaaaaatttttgtttttcttctcacatgccttcgggcttcaaggccctatctttcatgtggtatcagagcctggttgctttactatcgacaggtgatgataccttgtttgttataatatgttgtttgtaatatgattacgctttacatatatctttatgtgttcatggttttgtttctttatgattctttgtgaaagatttcaaagaaacatattttaagaaaggaatatgatttagccatgatatgaatattcaaatgcattgttttctccataaatttgttttcaaaatgcaatgatatattctatgcatgccgtggtcacatgaataaaaattagggttattaattttgttcattttgatcatgttatattttgtgttttgttataatgaattgttcatgagcatgacattatatttttgtgacaatatttctcatacaagtctatgtatataaatggttgattgtatggtttaatttttgtattctttgagaaagaaccaacaaaatttgaattatgtatttagatgcatatttcggccatttgagaaataattatattgtgtgcttgttagttgtttaacttttaaagtgcagatatggaaggggatggtcatggtgcccgaatttaaattttgaatttaaatatttgaattcaaatgttttaaatttgaattcagattttgttttagtttaaattagagctgtaacaattttaaattttgtatattcttttgttcctccaaagatgtattggagtttctttaattattttgtaattataaaaattaggttagtggcatttaggcatgaaagatttcatgatggagctacagcctaggagcaagaagaaagaaagcacgagcaccatgactatctcatataaaatctgttttatgtatgttttatgtttaaaatgactagtatgcatgagatagagtatcgcggatgtatgttttaaaatgactagtatgcatgagatagagtatcgcaaatgtatgttttattatgcatgtccaaaaacaacgagtgtaatccgatagatgtttgacataggatacgactagcatgataatagtacttacatgtttggtgagacccattaaaataaaagaaacccttaaaaggaatcaattattaagcacatgattacctcccaccaccaatgccactagaaattcctctacatggtggtgcgccacaactcagttgggacccactgtttcgttgaataagagcagtattagaagtgtgagacacttaaggtgctggttagtgcttaactgaatatatgagtagcaggctcagccgggcttatatgtatttggggtaataatgccaggttggttgcatgagatgcaccactaagtgacaaggagttgtcaacctgatgttaagagaaggtatgagatactattgataaagatcaacccattatttagtttaattttgcggtctcagacgaagattaaaataaataatcgtactcttaatcccactaaggtaattttaagataaaataaccctaagtcaaaataacaagggtcattgacttagataaaatagtgggaggggcatattatttaaagtctttaataatttcttatttcatgacaatatattaattagtttatctttacatcttctcaattaatagtatgactaatcaactatcattgcgctctattctcgatacaaacaaactgaacggttcaaattttacggactggtatcggaacctgagaattgttcttagggccgagaaaatcgcttatgtcctagaaggtaatttacccatagctcctaaggaaggggaagctgattatgagttctacgatatggaagctcataagcagcacatgaatgacaatacaatggcagtatgcatcatgttggcatctatgtcgcctgagctacaaaagcagcatgagcatatggatgctcctctatcatcttgcatctcaaggagttgtatgatgttaaaggcaggcatgagaggtttgaagcctctcgagaattgttctcgtgtaggatgtctgagagcatgagtgtgagcagtcatgttcttaagatgatcgaactcattgagaagctaggaaatctaggctttgtgatggatgccgagctaagtaatgacttaatcctcacatcacttccaccttcctttagtcaattcattatgaattacaacatgcatgggatgcttgttggcttgcctgagttgttaagtatgttaacaactgctgaggtgtctatcaaaaaagataagacacgctctcttctgattggtggggctaataaggccaagggtaaggctaaggagcctgtaaaaggaaactcccttaagcccaaaggtaaacctaagaagaagaagagcaacaagaagggtaagagtgcacctaaggacaaaagcgatgttgtgtgcttccactttggcaagactggccattagaagagaaactgtccagactacctgaagagtgtgaaggacaagaaacatagtgatgcttctgcctcaagtatttacatgattgagatcagttattcttatgctaatccgactttatgggtattagataccagttgtggttctaacatctgcaatatgttgcaggtacataagagtcccagaagattggagaagaatgaggttgacctccgcgttggtaatagagcaagagttgctgctcaagctgttggaaatacagacctcattttgcctacgggccttttattgcatttgaataattgcctttatgttccgggcatttctagaaacattatttcaatttcttgtttggaacgagatggtttttcttttactattagggatgatacattttctatcattatgaatgatatggtttatgctactgcttctttggtaaatggcttatatgttttagaaatgggaacaaaagttctcaatgtgaaacgacctaggacagataatcaatcttatctatggcactgtagactagggcacataaacgaaacgagattgtctaggatgcatgcaaatggatacctagattccatggatttggaatcctatggacaatgtgaatcttgtctatatgggaaaatgactcgtcacaagcccaaagggcttaagagtcataggactggtgagttattagaactcattcactatgatgtttgtggcccaatgtctatagaggctagaggaggatactcctatttcattacctttacggatgataaatcgagatttgggtatgtttacctgatgagatataaatccgaggcctttgaaaagttcaaggagtataggaatgaagtagagaaacagcgtggaaaaatgattaagacattacgatcagatcatggtggtgaatatctaagccatgagtttcaggattatctgagagagaatggaattctctcgcagcttattgcaccttacacaccacaccaaaatggtgtttccgaaaggagaaacagaaccttgttagacatggttaggtctattatgagtgagactcaacttccaaaatcattttgggggatatgccttagacatagcagcgtaccttctaaatagggtaccgtctaaatctgctcagaccactccatatgagatatggaatggtaagagacccaacctgagttatctcagagtatgggtatcgccaacatatgtcaaaacgttgacatcagacaagcttagtgctaaaagcactaaatgtctatttgtggggtatcccaaaggtactaagggatactacttttactcattggacgaacacaaggtgtttgtgtccaaaaatgttgaattccttgagaatgatttactctctcaaggagctagtgggagtaaaattgatcttgaagaagttcaaggaccacaggaacagattgaggaacccgagtctgcaccgtaggcgacgttctccaatggagaagtaaacacacaacttcataggtctactagggtcatccatccacctgagaggtatgggtttgtgattagaatcaacaaaccgtagaggataatgaaccaagtaactacgaggaggcagtcaaggacattgactcctctaaatggctagaagccatgaaatctgaaatagattcgatgtatcaaaacaaggtgtggaccttggttccacaaccgcaaggaaaaattcctatcggaaataagtgggtttttaagagaaagactgatgccaatgacaatgttcaaacctataaagctaggttggttgcgaaaggatatcatcaaagacaaggtgttgactatgatgagactttctcacccgttgccatgatcaaatctattaggataatgcttgccatagtagcatatcacgactatgagattttgcaaatggatgtcaagactgccttcttgaatggattcttgaaggaggaagtgtacataacacaacctgaaggttttgaatccaaaggccaagaacatatggtatgcagaggtcgatatatgggctaaagcaagcatcacgaagttggaatattcgttttgatgaaatcgttaggagtaatggattcagcaagaacgaggatgaaccttgtgtttacaagaaggatagtgggagcaatgttgttttcttagtactctatgtagacgacatactactaataggaaatgacatccccacattacaaacaactaaagactggctttcagaaagcttcaccatgaaggatttgggagaagcggcctttatacttggtataaagatctataaagatagatctaaaaggttgctgggattatctcaatccacgtatattgacaaaatgataagaaggtttagcatggaagggtcgaaaaggggttttcttcccgttagtcatggggtaaatctttccaaggctatgtgtcctaagtgacagcctaagaaagaccgcatgagtggaatttcatacgcttcgactattggatccatcatgtatgccatgatatgtacaagaccagatgtctcatatgctttgagcagtacgagcagataccagtcaaaccctggagagggtcactggacaacagtcaagaccatccttaagtacttgagaagaactaaggatgcgtttctggtctatggtggggtagatgagctttcagtgaaaggtttcactgatgccagcttttagagtgacaaagatgactgcaagtcatagtcagggttcgtattcaccttaaatggtggggcagttgatattactttgtcgagacgcatcaaaaacaattttactaagctaattttgtagcacagaactaacctaggtcgactcagagacacgatcaatatggttctagcttcaaatcataggtaataataagggggaattttgtcaaacagttggtatgcgtaaagtaaaacatgcaagaacacaatctaaaattaaagaacagtgcaaaaattaacaagattatcaatgagtaaagtaaaacagattagaaagcatcaatccaattcactaaccaaagctatttgaatcatcatcattcccataaattgattctatcatgaacattcgttcaatctcaatagaagcagttcaatcgatcctactcctaaattaattgaaaccacaaccctaactgaaatatcattcaattaatcttgtgattatcatttgaaattaagacatgaatccataatcttaattcactttcaatcctaaatgtatccataatcatgaaaacacaatagaaattgaagaagaaggtgaatattcaagtagatatcgaaataccgaaccagaactccaattcttctcttgcttgagttagatccttggattgattagtgatttagccttccatgatgatcaccaaggaaagccccatgaaatgagtgcagaaaaatggaagaatagcaaaatggaaatgaagaagatgaagaacaatgaagaacaaaatgagagaaaatgaagaacaagcttttgatactaaaaactaaagaaaagaaatgtaaaacttgtttattgaattgtaaagtgtgctgtccaagtttcactaaagtcactaatatattagtgactaaattctgaaaatagaatgggccataaacaaacccaacaatctaattatatactatttacaaccatgaaaatcaaattcgcagcccaaaattacaagtgcagaggtgttaacttcgaagctcaaaatgatcctcaaaatgacagaattggccttgggctatttctagcaaacttgtagatcttttcgttatatttccaaggactcctagaatgctccattcagagatagatagcactctataggccctgcacaagtcagatacattaagtgagcaaaaatcctaaaatacgcaacaattaacaattaagcccacttacttgtctaggccaaaaaactgaattagaataggaaaataaaggtccaagagaggtcaaataagctaagaaggatagaaaaatattcaactaaaagcactctatcaaaataccccacacttaaacttttgcactcctgggcaaaactaaaagaaagactaagagaaaaattcaaactaaagtagaccaaaaatttagagaaagggtatgaacaaggcacacatatttttcaatggatcacaccaatgatcaaaagtgagagatggaaaggtggaagaataatattgaggtaacaaacaatccatgaaaacattagcacaaaatgcaaagtaaaaaagtagtcaagcttagaattaagaatgcaccaaggtgatagaattctctaaaagggtggcactcaacctcacatgatgtgtatggcttgtatttacactcaaacactacatgcaactagcacatccaagaattgccaaacctctcattcattcaacttgaaatacacatgcatcaaaagatcaaaagaactttattagcttgtaacgagtggcttaggaaaaggtggatgagaaaaggatatttaggctaaaacttaagagaaaagagggataatggggagcaagccatcaagataaaagaagggtagaagcaataagatgaaatttaaaagaatttacaagaatgaaaatgaactataacaatttttattgcacatttctttttctttgcttgaacttctttttctttgcttatacataatttttttttctttttttctttggacttttgctatttgaactctttcttttctctttttcttttcttttctttcaaaacaaaacaaaagacaaacaccccacacttgtttgaaacccactcccaaaacaattccaaagccccttttttccctaaagctaggataacatggttttccatttttttctttgtttttaatgagctaaacaagaaagaaaaggctagaggctcaaagagggtgacaatggatatcaacacaaggataggtttatttggctagtggctaaaacaaagaaggcctaaatcatctcaatcaaagcatgtgcaacaaggaatgtcaaaagaggaaagacaaaacatagagtaatcaagctcaagggtgaaatcacacataaaagagcatatccacaaggctcaaaaactcacaaggcataattctaccacacatggttcatcttaaattctatttctcaagcctacttatcacttcaacaattgcaacaatgattcacatcaagtatgaaacctctcaatcgaaccaactttttaacatttctcacaatttatgcaagttggcaatcctatgaaaaacatgaaaaagtgcctaaattcaataaaaatagcacaaaacaaaaacaacagaaatagacaacaaaaacatacagactcaaaaactgaaacagacaaacagaatacagacaaacaaacgaaaaacagaaaacacagacactgacaaacagacagcaacaaaacataaacagacagaaaatagaaaataaccaaagtttaaaaaaattttaggatccttcaccccccacttgaaatgcacattgtcctcaatgtaagcatgcaaagaaatgcaacaaagagataacaaataaaagaagggaaaatgaaactccccaaattgtcattcacgcaaaattggcaggatcaaagagatgtcctctacaagctcctcctccacttgaaggctctcatgaaatgctttgagttggtgaccattgaccttgaagactttgccggtagcttcatttttaatctcaactgcaccatggggaaaaacattagtaatgacaaaaggtccatcccatctagatcgaagtttaccggaaataagcttaaggcgagaattaaacaataacactttttggccactatggaactcctttctaagaatcctagagtcatggaatttcttcactttctccttgtaaatcttggagttctcataggcttctaaacgaatctcctcaagctcttgcaactaaagcttcctttgcatacccgcttcatcaaatgccatgttgcaactctttaccgtccaataagcatgatcctcaatctccactggaaggtggaatgccttaccgaaaaccaccctatagggagacatccccaaaggtgtgcggtaagcggtcctatgagcccataaagcatcctcaagaagcttgctccaatctttcctgtttggttgcaccaccttttgtaatacttgcttgatctctctgttgaaaacctcggcttgtccattagtttggggatgataagctgtagcaactctatgtataaccccatacttctgaagcaaggatgtgaatgaccggttacagaaatggctcccctggtcactgataatggctctaggcacaccaaacctgcaaaaaatgttggatctcacaaaatccacaacaactttagaatcattagttctggtggccttagcctcaacccatctagaaacataatcaaaagcaagcaaaatatatgaaaagccatgagaaacaggaaatggtcccataaaatcaataccccaggcataaaaaatctcacaaaaaataatgggttgctgaggcatctcatgtctatgtgtaattgtgcctcctgctctctgacattgctcacaagtggtggtaaagtgatgaacatctctaaacaaggtaggccaaaagaacccacagtctaacactttcctagctgtcctctaaggaccaaaatgacctctggtaggtgtgctatgacaaaactaaagaatagactgaatttcatgatcaggcacacaccttcggatcacttggtcactaccaaacctccacaaataaggatcatcccaaacataatatttagtatcactcattaagaagtgttctagctccttcctcaagagatctatttttcctctccacaacaccattttgttggggtgttcttggaacagaaaaattacggttaattccattttcctcacagaatttttcaaaatgttcattttggaattcaccaccatgatcacttcttatagagacaattttacaacctttttcattttgagtaagcttggccatttttctaaaagcaaggaaagcatcactcttggatttcaaaaacagagtccaagtgtatctagagtaatcatctacaatcacaagtccataataattcccacctaaactcattgttctagaagcaccaaacaagtcaatgtgaagaatttcaagtggtatagaggtggaaacaatgtttttactttgaaaatagttctttgtttgtttccccttttgacaagcatcacaaagtttgttcttctcaaacttgagtttaggtaatccaattactaaatattttctaatgagcttgttcatgtgatgcatgtttatgtgacttgttcttctatgccacagccaagtttcatcaactttgcttattaggcaagaagagttatggaataatgcatgatcaattgaaagcacatatatattacctttccttttacctatatgcagtacctcaccatttttatcatcagaaattatgcagcactctttgttgaagttcactttaaagcctttgtcacacagctgacttatgctcaataaattgtgttttaaaccatctacatacaacacatttttgatcttagctttgaagccgtctccaatgttaccttctccaataatcttccctttattattatctcaatatgtgacatatcctctttctttgagattcaaatttgagagtagggacatgtctccagtcatgtgtctagagcatccactatcaagataccaagttgatgttctagctctttgacacacctgcaaaattcaaatcagatttcaagggaagatacccaattgaagttgggtccataggggttagcatttttctttcttttaggaatccaaatgcaatcaccattaggcacatagaatctcctagcatagcatttacatgatgtgtgcccctttttcatacaatagttgcaagtgatagattttgaagttttcccaaaaccagaatttttattgactcttaagttcttttgccacttttgattcttctgttttggaggtacaaaaactatttttccaactgattttgaaccatgtttataccccaaaccagaagtatcttcaacatatttttgcacacttaacatttcagctaagttgcattttcccttgtaaaactttctcaagagatcaatcaaatcactgtttttggctaaaagcaacatatatttttctccttgactttgtttatactcatcaaaatccttttgaagcaagttatacttgtcaacattgctagaggaagaagcacacacacatccattcaatttgtaacttgaaacaagtttttcattttcctctttcaagttgcaaatctcattttgcaattcagtaattttttcaatatgccatctaagatttcctctgagcttattattggattttgcaagtttttgggctttctcatgcatttcttaaaagacatgaatagcttgatcaagttcagaatttacctcatctccatcacttagcaagtcatcatcatcttcattgatggtggaggtgagacacatgttagcttcttcattttctgtggaagaatctgaagttgttgactcattatcttcctaagctatgtatgctctttttgcttttccttcccttttcatcttgctttctccttgttgcttcctcaagtagattgagcactcagatttgatatggcctagcttgccacactcaaagcaagtgaaattgttgtcaatcttcttgttgaggttgttgttgatgttgctatttttgctacctttgttgaactttttgttcttgttctttttcagaaatttgctgaactttctgaccactaagtttacattgtcttcatcatcctcttcacttgtttcctcttccttttcagctttcaaagttgcagctttcaaggctatgcttcttgttttcttttctgcatcttcacaagatgttaattgagacatttctagttcatattcaagaagcttaccaaatagtgcaaccatagacatctttgatagatccttggactccttaattgctgtaacttttggttgccaaggtcttgtcaaacacttcaatatctcgatgtttaattcttcagtgtcaaagacctttccaagaccctaaagatgatttacaatatgagtaaatctggtctgcagctgagaaatgctttcattggtgttcatcttgaacatttcatacttatggatcaaagcatgcttccttgatcttctaacttcctcagttccttcatgagtaatttccggcatctcccacatttcttttgcactgttacatctcacaatcctgaataattcattagaggaaagtgcataggtgatcatatttttagctttaaaatcatattgtgcaaccttttgttcagcctcagtcatctcatcccattctttgggaatcaattcatttgccacagttttctttggaataaaaggaccctttactattgcattccatgctcctggatcatttgattgaataaagatcttcattctatttttccaaaaactgaaatgttccccttcaaacataggaggtctgtttaaagaggcaccctccttaaaggttatttgtgaagtattcatatttctttttgaaaagaaaaagtgatcttgagcaactttcaagaaccaactcttgatgccaattgaaaatgataggaatacttcaatacaaccaagaggggaggggtgaattggttgaaccttggtatattaaaatttttaaatcagagttttcacaggatctttatcactttaaaaattgttttgaaaccaagaatttctatgtaattcaatcaaattcctctgtcaagaaatcaataagcaaatgatagttttctgtgtaatgaaatttgattacaagcaaagcaattgagagatgaagagataggaataaagatcagccatagattttatactggttcacttcaaacactatgaagctacatccagttcttccactcaacactagagtagagttccactattgcaaataatattcttacaagatattacaagcctctctttatcaaccctagataaagttcagaagtctaaaacactattagacccttagagaccaaacccaaaactgagaacactattcagcagcccttagagaaacactatctctaaccttcatgtaagaaaccaatttacaataagctaatctttacagaaatcaattaaaagatttacaccttcaaagaataaggaaagatttcacctgataatccaaagaacacatgcatgtgaatgattcaacaggttgaaagaaagattacagactcaatgcatccctttccttaagttttgaaactcaatgaagcttcacctcttcaaatcaaaaacccatacgaatttttgaagcctaaatgctttttgaaactcatgaatgtttgtgattgcccagaatacgagttattcaatctcacaaagcacagggtaatgggttctatttataacagctttctaactgaaaataatcgattaaacacgctcttgtaatcgattatttcgcatttgtaatcgattattccaagaatgtaatcgattaaagtgctcctgatatgttctgggtttgagcaatgaacaatgtaatcgattattccgtcaagtaatcgattaagacaaacactcatgtatttcaaatacactgagtaatcaattacgaatttggtaatcgattaagacagacagaccaatattcttaaatgtactatgtaatcgattaaaacgatatgtaatcgattaaatcagcaaaacatgttaaccatagacattatatgtaatcgattacgaacttatgtaatcgattaagatagttagtatgatttttccattttagcctatgtaatcgattatttcgatatgtaatcgattacaatgttcttgatttgttttccagaaggcacgaagaacaaaataattgatgccaataatgctgtaatcgattaatgcaggaaaacttcatttttccaaaaactttgattttaaaatgccttacttgttaattgcctttatttagacctttaatctaacaatcctagatgaatgattatgcatgatatgctaattggattatcagataacacatcttccctttttacatgaatcaaattgatcttcatagcttctttggcacatttgcaatgaggcatgttgaaagcacaaaacactaatgcttgatccttgttcattcatgcatgactcctcttgaatcaacaactcttggatgtcccaacacgcacaggtgcagtttatgctgaagtaatcgattaattcgtccttgtaatagattaaaacaaagtttttacacttaagtaattgattacaactttctggtgattgattacgacagacagaaactattttacaagtgtctcagtaatctattataggcagatggtaatctattacaacagataggacttcttttgtgtttgcactgagttggtgtacttcttcatgcttgtccaaaagatacaagttagcattgatgtggtcttgagggacttaaattctagctcttgtcatgggtccttttaggctcaccaaaggaagttcttcaagctttccttctagacctttagcttgcaatgaaccttcatcatcccttccttctttagagaaacatgactcaagtttgcttcctcacttgtacctacatcacacaaagaaagatcacaaacattaaaagtagtactcatatcatactcacttggcaactcaagattctcttgagggaatctatccttccacttgtgcttattggcttgtttagcatattattccattttcctctccacatgggtcttcacttgttcatgcaatttcctaacataagaagctttagaaaaagcatcatgattaatcatagaagaagtgttaggtgatggcaataaatcaaaaggagttaaaggattaaagccataaaaaaattgaaaaggaagtagttttgtgaaccactctattgtaagcaaacacaatgtgaggtagacactcctcccaagtcttcaaactgcccttgatgtaccacttagcatgtctcttgttgcgtttgccttgacttttcaaatatttaagagactcatgatcactatggatcacaaattctttaggtaaaagacagtgtttccaaatttgcaatactctaactagtgcatacaactctttatcataagtggaataattcaaacatgcacccttcaatttctcactaaaataagaaatataatgtttatcttgaatcaaaacccccctaatgcatacattagatgcatcacattccaattcaaaggaagcattaaaattaggcaatgtaagaataggtgcatgagacaatttatccttcattgtttcgaaagaaacttcagccaaaagagattgcatagctttgataaatttttctccttccttttcaacatgtaaacaaagagagttaggaagcatataataaagaggttgtttggccaataacactttcttgatttccttttcattcaagaacaagctctctttagtctcttgaatttttttgctctcattctctttctcttttcttttcttctcacttgtttttctctttggtagctcaccattcttttattttttggtgcaatattttttccaactcttacattcttttttctattaagagatcaccctttttggccttcactagtgtaagttcttcttcctcttcacttgaagaaatagttgagtcacttgaagactcactctttatgcctctatcttcaagaaaaatcatggttctcttattaggacattgagaatcaatgtgacctttaccaaggaactctaaacacttgatattgcttgatcttgttggagttggttccacaatttttttgcttgagctatccaccctttcttctttatttttcacttgagaaacttctcttttaggcttgtccttcttgctggaagttgtagccccattggtcttggaaaaggaagcttttctcctttttagttgttgctccaccctttgagctttgtggactagctcctcaattgtagcataagaatgtggctccatcatatcttgaatttctctattcaagccataaaggaatctagccattgttgcttcttggctctccacaatttcaacccttatcatcatcaattccatttccttatagtagtcatcaacactcttgtagacttggaaatgtctttggagcttgttgtggacttctcttgcataataagtgagaacaaatattcctctcaagcatgccttcaagtcatcccaagaatttactctttgtctcctcaacctctctatgtccatttgaatttggttccaccatatcaaagcatagccactaaattctagagttgctagaataactttcttttcttcatcaaattgttggtatgagaaaatttgttctactttcatctcccactcaaagtactcttcgagatcattattgccaaggaattttggaatttaaattttcactctactcaatcctccattcctccatttctctttattctctcctcaccctctaatcttccccatctctattttcccacctaagattgtgtctcctatgtttttctcttttattattttctctccaatcctctttctcattctcttcacaatttcctccatgagaggaagcatactcactcatcctcttaccaccatgagattcttcatccacactaccaatgggattactccttctttgagtctccctttgtaactcttcaaaccttgcatccattttggtttgcaagtcttccatttgttttgtcatggctctcatcaacctagaggtcctaggtgacaaagcctcatctcctattgagctcatccttaaaaaaaaaaaatggttagcaaaaacacaagtatataagaaattctcaccactttctaagtgttttccactcactcttgtttgcacactttatctaggcttttttctataatgttctctcttgcctttttccactcttattcctctctctagttcttaagcaaaaaacttctaatcaaatcaagcttctttactattgtggaataggaaataattctaggctagactcaagagtccaataacaaaaaaactctaagacaaaaccttggaatttttaagagacaagcaacaaaagaaatttttagaaaagcacaactcaaatggaatttaatgagacaactcaaggacatatattggctgtaccaaactgcacaaggaggatatgccaagtaaattcaattgctagaagccaaatttcatcaaatttgcatgtcatacaagttcacttaattttgtggtttaaaggaaatttgaacttgtagcttttgtaactttggtttgcttctaaattctatttttctttgtatttttccagccacaattcaataatgtctttggctggaccaaaatgtttctctttggtcttttcttctttctttcaccaaaaattttgtaagcttttgtttttcttttgcacaagttcaaaaattcttaaagaaattcaatgaatcactaaaaacaattgtaaaatttgtttctaacaactcaattcagtttaggcatgagattagaatcaaaacaagtggtcatacaacacaaaaaacactaaaaacaaaagtcgacaagaattaaagctagaaaattagaaaaatattaacaacaaatgaagaacatggaaacatgaatttcacacaaaacttgaagaagactactagggtaggtggcacaacaaatcacaaagccaatccaccaagattcacacgaaaatcaacaaggaacaaggaattgaaatggatttttcagattttcaaagttgccaaattttaccttttaagaacttttaaaaattgaacttgaagaagaatttcacaagtattaggctctatatatcacatgatgtatggctgaacccattagccattagttttcccaaatctaacttgcaatgaaacccaatcttcaagcaaacttcaagaactctaacttctgcactttcaccagaatttcagactgtttttaagcttttaattcagcaatgaaagatggaagataggttagggatgaaggtggaagacaccatggagaagctctccaataagtctaagaagaatcaccacaatagcattgagaatccattgataagactcaagaagttcttgcacaagaacaagagagaaactctcacacaaatttcaaatttgtattagtgaaccaaagttagttacaaaaagtttttgggtagcttatataacccacgaaattataagcttaatgccactaaatgtaaggaaaatgcaaattgaaatgaagcccaaatgaagcttgaagtgcaagcttatcctaaagtgactcttggatgtcccaacatgagcaaagtaatcaattaattcgtccttgtaatcaattaaaacaaagtttttacacttagagggtacaaccttggcaagagtggaattttgtggaatatatgactcatgctccttaagcttccttaaattccgtgggtggtgtagctgcaaagattaatgcaattatgtttctcctagaagttggtttgaaccaatgttactgagattggaaatcccaagtttgtctatgaagaatggatctaattatattagtgtctatgatggatttttttgtataatactaatccatagggcctaattggtgaatgctacaagatctagattcttcacaataacactagaaacaaatggaaaagggatgtagcgcaacttggtagtgcgcttgttttgggaaaaaaagtcatgggtttaaatcatgtcatccctatgattgagaggataaagttccatggcctaccattaaaagatctggtggtccatttgaagaatctcttgaggcttacaaccatggtaaaaagccctgccaatgctcctgactacattaggttggttgtgttcccattctcattagcgaggagggctgaagattgactcgttgacttttcaagcagaagcaataccacttgggactagtgctcactagcattcttgaagaagttcttcctggttgcaaagtttgagcagttgatccaagtgattagcgatgtcgtatcgcttcaaaacaattaaactatggtaattttgtagcacatgattaacctaggttgactcagagacactatcaatatggttccaacttcaattcactaataaacaataggggatttttgtcaaacaatttgcatgcgataagtaaaaattgcagaaaacgtataaactaatgcgaattgacaagaggtaatgtaaaatagattaaagagcatcaatccaattcaccaaaccaaacaatggtaattatcatggttctcagataatgattctgttatgaaagttcattcaatatcattagaagcagttcaatcgaattaactcctaaattaattgaaatcacaaacctaattgaaatatcatctaactaatctgtgattaaaattctaaattaggaaatgaatccataacctaatctattttcaatcctaaacacattcataatcatgaaaattaaatagaagattgaagaagaaagtgaacatgcacacaaaattcgaaatactaaaccagaactcaaatttccatttgcttggactggatctttggattgattgattgtttagcctcccatgatcatcatcaatgaaagccccacgaaattggtgcacaaaaatggaagaatagaaaatgaaatggaagaatagaaaatgaaaatgaagaacagggaagaacaatgaagaacaattgagagaaaataagagaaagggttttgattctgaaaacttgaaaaggaaaatgtaaattctgtttttgctaaaatgtaatgtaatattcactaactaattgcactagcatatagtgactaagtcataaggaaagaatgagccatgagcaggcccatctaaacttaataattttgctaattacactaataaaaattcaactcgcagcccaaaattcaagtgcagtgattctgacttcaaatcctaaaatgaccctccaaatgacagaattggcctcggcttatctctgacaaacttgtagatccttttgttatctttccaaagactactcatatgctatattaggagttctgcagagctctgtaggtcctatacaagaaagataggtcaagtgagcataaaatccgaaaataaacaacaattagcaattaaactcagttgcttgcctaaggcaaaaactgaattaaaatgagaaaatagaagtccaagagaagtcaaaataagctaagaagaatagaaaaatatttaactaaaaacgcccaatgttagcttccttaaattccgtgggtggcatagctacagagattaatgcaattgtttctcctagaagttggtttgaaccaatgttacctgagattggaaatcccaagtttgtctatgaagaatgtatctaattatgatggattttttttgtataatactaatccatagggcctaattggtgaatgcaacaagatctagattctttacaataacactagacacaaatggaaaaggaatgtagcgcaacttggtagcatgtttgttttgggaacaaaatgtcatgggttcaaatcttgtcatccctatgattgagaggataaagttccgtggcctaccattaaaagatctggtggtccatttgaagaatctcctgaggctgacaaccatggtaaaaagccctgccaatgctcctgactatattaggttggttgtgttcccgttctcattagcgaggagggctgaagattgactcggtgacttttcaagcaaaagcaataccacttgggctagtgctcactatcattcttgaagaatttcttcctggttgcaaagtttgagcagttgatccaagggattgaaaactttacctagtttaagtaggagtcactttctgaagcatgagaatgattcaaggggttgcaaagaagtttccacatcaaggatacccaccacaaaggcttgtccacattttttatggaggactatcacaacacaactggtcatgcttagatgcagcagcaggggggaacctcatgcacaaactggcatatgctataatggagattattaaggctatggcgtctaatgcttataatggcatgaatgacaaaataattctcaagagatcatctagagttcatcaagtggaagctaattcatttgaatcctctcttgaacaaaagatggacatgttgaccaaataaatagagactatgatgaagggttaggtgtagatgatgacacccatgcccccacctcctgtttgtgaaaagtgtgggagacaggacatgtggttgaagactgcccatacactaaagccttggaggaagttaactatgctggaggaaagagtattggttatgacctttttactctaatacctacaactgaggatggaaggatcatccaaacttctcttgaaaagagtagagagaccagaggcaaggtcctagtttgagttagaatgtatacaagcctcccacttgcaaggcccaagccagggctagagttagaacacttatagaggcctaggcagaaagagaagagatctagcatgcaatacacggtgatggagcatactgcatataactaagagtgacgcgaggttcaaatcctttgaatccaccatgtccaaccttgtcactcttatatcttaaagagctcaaggtaccttgccttcacaaactgagcccaactaaagtaggatgtgaagataatgagcactagaagtggaaaaccacatgtagagtacaagaagaaggagaaatatatttctacagagaaggaaaaggagactcctactgaaggaagtccaacccaagcaaaggaaactcctactgaagggagtgtagagacaggaaaggagaaggaggtactgacacctccctaggtaaatattccttttccccaaagattagagaaagaacatgataaacaattttctaaattcttagaaatgtttaaaaaaaattgcatattaacattcttttcaccaaggccatttctcaaaggcctaaatatgtaaaatttttgaaggaaattattcccaacaaaaagaaactaacaaaatttgagacaatatgccttattgaggaatattctgttgttgtcttaaagaagttgcccccaaagttaaaggacccttgtagttttacttaccatgcacaatagggaattatttatttgaaagatgtttgcatgacttggggcaagtattaatctgatgccttactttgtatttaaaaaattggtctgaaagaaacacaacccataaacatcaccctccaacttgttgataggtctattgtctttcccaaaggcatagtaaatgatgtgctggttaaggtggacaagttcatctttttggctgattttgtgatgcttgatatggaggaagatgaggatgttctgatcatattggggcatccaatcctaaatacttgtgatatggtgatagaggttaggtggggtaagctcacccttaggaaggggatgagaaacttgtttttaatttatccgattctgttaacaagcctatctcttttgccacttgtaactttatacaagcgagagatcccactgatgctttggtggaagcctcattcccaagtataggtatagaggaccccttggaaagagttcttgctactgaggacttggactgggatttgagcagggatgagaaggaaatattgatgttcctccaagctcaaaaggattccaaaacaatgagaaatcaaaggtttgaagagttggaaagaaatagtaggccaaagcctaaaccttacattgaggaatctccagtgttggagttaaagcccctgccttcaaacttaaaatatgtttttgttgaccctcatctttctttgtcaattgttattgctacaagtttgtaggaagtagaagaggagaagcttgtaagggtcttgcgggagaataaataggcctttgggtggaccatacatgacatcaagggtaccctttagtgtgcacccataggattcatatggaagcaaactaggaacctaggcggtttccttagaggaggcttaaccccaacatggtgaaggttgtaaagggagaggttccaaagttgctaatgcggatatcatctaccctatctccgacagtgagtgggtaagcccagttcaatgtgtccccaagaaggggggcaccactgtaatggaaaatgagcagaaagagctcatagcggttagaaagactacttggtggaggatgtgcaacaattacaagaaattgaatgaagccactcagaaggaccactttgttcttccctttattgatcaaatgcttcagaaactatttggtcatgaattttattgttgtcttaataggtattctggatatctggaagttcctttggttgacaaggatcaacataaaactacttttacatgcctttacgggacatttgcatatagaggaatgctttttgatttgtgtaacgcccttgcaacttttaaaagatgaatgatggctatttttttacttgattgaaaatacattgaaatatttgcatatgacttttctagttttggtcaatcttatgattcctgtttgaaaaatttaaatgttgtcttaaaaaagtgtagggagactagactagttcttaactgggagaaatgttagttcatggtgtgtgagtgcaatgtgcttggacataaagtgtcatctattggcattgaggtagaccccaccaagatggaggtattgcaaagttaccttcgcctaattgtgttaaggtggtaaggatttttctaggccatgctggcttttacaagatattcatgagagacttctctaaaatagctaaaccaatgaatgacctcccaaccaaagaggtcacttttaatttttctacagagtgcattcaatttgttgaaggagcacttgattagtgctctgtggttgtttcccttggctgttcattgccgtttgagctaatgtgtgatgctatacgactatgggggcagttctgggccaaatgagagacaaggtctccgcaccatctactacaggacgctagatgaggtctaggaaaattataccaccactaagaaagaattgttatcagttgattttgcttttgataaatttaggcattaccttgttttgtctaaagtcattgtttacactaaccactctactattaagtttttgctcagtaaatatgatcccaagccaaggctccttaggtggatactattgctactagagtttgacttggagataaaggataaaaaatggtaagaaatatatggttacaggctacttgtctcgtgatgacccctctattagacaacttgccaatacggagctattcaagagacattccctgatgagtacttggtagttgttgtagctcttccaagaacaccttggtatgctaacattgtcaactacctagcatgcaaggtgtttccctcgagtttatatttcaagagaaaaaaaggctgatggcaaaggctagacactatttttgggatgaccaatacctttacaaggtttatggcgacattgtgtgccccacgaagaggtaagttctattctctaacactgtcattgtatggaggttaggggccatcatggacccactagaatagctcacaaggtactccaatgtggcttctttttgggtcaccatgcatagggatgcaaataagtactgaaaactgttagcgcactggtgctttgtccaagcgccttgagatgcctcaaaataatatgcttgtagtagaactatttgatgtgtggggaatttacttcatggatcctttccccaaatcttttgggtgtgagtatatattggttggtgtggactacatgtccaaatgggttgaggcagtagcactagctactaatgatgcttaaagtatagcaaaattttagaagaaaaatatttttacatgctttggtacacctcgagcaatcattagtgattagggagcacatgtgcttttgcaataaatttttttatggccttttggataaatatggtgttacccataaggttactactccctatcacctttagactagtgaccaagttgaggtgtctaataaggaattgaaaaggatcctagagaaaactgtgagtgcgtcccaaaaagattgatcattaaagttgtacgatgcactcttggattacataaaaacattttaagactcccactggaatgtctccatttaggatagtttatgggaagaactgtcatttgcttgttgaacttgacaaagagccatgcggggtctgaaatttctaaactttattctgaacttgcaggtaccaacaggttgtagtagttcaatgagctacatgaatttaggcttagtgcttgtcagaatgtcaaactctataaagagaaaaccaagaaatggcatgaccaacacatcaagaggcgtgagtttcatgagggagaaaaagttatagtctaaacctcacgtctccacctcttcccaggaaaattgctctcgaggtggtatggccccttcatagtaatgaaagtattttcctatggagtgccgaaactaaagagcaaacaatgggaaaatctttaagattaatggcgacaaggtcaaaaattatgagcatggattgctccaagtgcactgtattgtgcattttcaggagtgaaaacaagtgcttcacaggaggcaatctgtggattctacgagtctcttaagacccaactgtatccttaatttataattttttctttttcattttatttagttctgctaactatcacagtcgtggtcaattgaccacagcccacacagtcaccgtaggcttagtaacgctcgtggcaaattgaccatggcgaaggcttccaatgttgacttgataatgaccatggttaaccatcacggtcgtaaaaaataatattaaaataaaaataggtgtagctataaatatcatagtgattataaccgtgatcaccaccatccccgtctctcctttgactaggtcagttccctacaatcacccctcatgatccacttttcaccgcagttgtgattctccctacatcccaagtttaccacgactctataaattcatcacgaccgtggtgaaattttcttgtagtatttttttgcgtcacgaccgtgatcaacacatcattcttgtgacgccatcttcttccttcacttattctcaagcatcacgaccgtgatccctctcacattggcacctttgtctagcaccacgacaattatcgtttccaccacgattgcggatctcgttatccttgccactaactcaaaaatttctttatcttgtttgcttctcttcctctgttttgcaaatactttttctttctatgttaggcacatgaagcttttgcgctaacgaaaagtgcctcgtgtaacaccctaaaatttggataactaaaaatagatatttggtgtatttgttgtgattgtttgattatttgattagtttagattaattgaaatgttatgtgaattatagatgagcaattacttggtgtagatgtcaagttatgtggagttgttggagctgcattgtaatttagtgattctgagtttgacccgaaacctattttggtaaaatacaaattctggattggttaaccgttggatcattttaaaagtttaaaggtaggtttttaacctaaatatacagaggttgaccgttgggattgtctagacaatatctgaagtgtgagaaattaatttttcactgaaccaaaaattttaaaattgggccaattcgctcaggcgaattttggaagactttttagctcacctgggcgagtcaaggcggttttaaaagaatgcagcagcctccaaatcatgaaaatggagcttcttcttcctccaaacagcacccaaccccttcctcttctcctccaccacccacggccaccggtgaccgccatgagccacctgttaggactcttggcaagtgtactaattgtcgttgcaggttacaaaatttataaaagatcatctccatagggacttgagttactcagttaatttgaataaaagtaacaatttaatagtttatagacaacaagtataatcgaagtttttgatggtttttcggaaataatgaaaataaaggaaatagtgcgtcagaaattaaggaaataacgaaaactaataaaatgaatttaattaattgaagggaacgtaggattgggtttcatcattcatacccttggtcttcaattaatattaccatgtataaatgattttctatcattactgatgcacacattaatttaccccgaatcgatccctcgcatattaagtaaataacgcagcattacaatcataatcacgtgctatttgtaatctaaatgttatgctctattcctagcaatgtaacgtaaggagtaaaatcattcagttcaaatcctaagggcactttctagtcaagcttagaatccaatttcatgaaactagtgatcaagtagaatcaagcattaagaacagaatgaaatcaccaaaatgagtagaaaagattcatatattttttaaatattaaaagatatacataagggtaagaagattacatccaatcctttgaagaaactagctgatcatggtgtagagtaagagatcaatagaaaacatgacgaaggtaacaatccctggcccgttcctacagagtttccactcattttctctcttctctcacctctctctaagcctcttggcctgctggtttcattctctctctccaatgcttcttttcaccttcatttgcatggctttatataggaaatggtgaccagcttatgtctattcgcccaggtgagtgatttggtctgttttcactcgtctgggtgagttaatacttagtcctaaaggaagcaattcgcctgggtgactaaattacacattggtcttctagaaatgaccttttgcccttgttgcttgtcttgattgtttggatgctccagataccattgaaacctatcaaaacaccagatctgattggactaatcttccaaattataaataacatgcttatatgtgtactaactataaaacaactaggattagggccattttataagtggatttcctaaaatcaaaagataagtgtcagcattataatatcgaaagtagctaaaatatggcacttaatcgaagcagaatcttcaaaactcaactcaaggattcggtagagaacggagtctccaatcctcctttcttggtttctttaaggtaaccatggtttctttgtcttcttttagctagtttgaagcctttcttgatatctcttgtgattcaagtaccactattggttgtttctatacttcctttgaaaaccctttgaaaacgagatgttgtaaaagtctcatttttatgaaactgatgtcatttctgtgatccttgttgaaacctggtcacattcgtgtgatcggaatttcaaaatgatgtcttttgatgtggactcccaaaacactattttagcctctttttaaatttgagtgggtatttgaccccaaatgttaatattaaccttgtctttgaaatctatactaaattgtcttcgatttggtatatagggctctacgtttgggccaaagcacacgaactagagggatctcaaaacaacacttgaggagctaatgggagaatttatagataggtaaggggagtttatcatttagttatagttttggtaccatagttgggggtgttagaatcaaagaagctgaagcaaaggattcaaagatgattgaagtaaatgagttttgatattttacatgcccaatcaatttgatggcatatgtaattgtgtttaagcttggttcattagataaagctttataatcctcattagctatgataattcatgcattcatacattcatttgataggagttaatcatgtgctaataagcaaacctatagaatttcataaaggcaattaggaattgtataaaacattttttcactgctttaatcgattacttaggtgaaataatctattataggcgtgtgaatgatttctggaaaatgccttatgaacattttaatcgattaccaatggctcgtaattgattaaattagctttacacaaaattaggaacttcctgtgataatcgattatcttgggaaataatcgattacataagcttctgcataattttacacagcatgttcatctagtttaatcgattatcaaatgttagtaatcgattaaatatgaattgttaagttttaggcatgatctatgtaattgattaaatgggtacttaatcgattacatgtgtgcattgtaaaacttagtttgtctagcttaatcgattacaaggtgatttaatcgattattctgttcgtaacagatttccagatttctgatgaacaatttaatcgattatatggttaaaataatcgattacaatagttaaaataatcgattacattgacgaattaatcgattacagatagttaaaacaatttctttataaatagaaaagctgagtttgagtgagactaagtaagaaagaaagagatactcgtgcaaactttgtgatatacatattctaaagttctcaagtgtacccaaggctgaaattagtgagataatcaaatgtgttgagtgtcattgagatttacttgagtttttagtcttgatactcaaggattgaagacttattcaagctagtgcttaaagaaagtaatcaagaaagagtcatagtcatcttttgcatataatctcaggttgattaaatcattcatatcattgtaattgctgaggattactgatgtgttgcaaacacatcttagatttagaatagttttaggttaaattctagttaaatatttaggaaattagtttagaattagcctagtttgttagtttgttgttttcaattcaattcattactaattgagccttttcaggtacaaaaaggaagcttagggccaaaagaagaaaaaaaagcttattttgagtcccgcgcggatagcgtgggatgctgcgcggacagcgccatgtgcaagaattcagcaaggctctcgaagaattcacgctaacagcatgagaatccgcgccaccagcgccagaacccctgcagcattaattgcttcgaacaacccacgctaccagcgtgggattccacgttatcagcgccaattaaagccagacccaagtgattcagttcgaatggctcacgcgggtagcatggatgtcgcgctactagcgccccactttcgatcaagtcgcgctaaccgcgcggaatcgcgcgagaggattttctgacaaaaaaaattaagcacatggatagcacctgagattgaatgtggcttgtctataaatagttggcgtcagaaaaagtacagaggatggagagagggttcagaggtcagagttagggttagggtttaggaatataggtttaggtctctttcttctatcctagactagctatcatttccatccaatttgaggaagcaagcatcaaggctgaagtctgcacaacaatggtttatcttattgctctgatgtatttgcagcccatggttggctaagctctatattgtggaaaggccatgagactatgaaagttactctttgaacttgattggtaatgaattatatgtgttaatagctttactctgttctgtatttccttttactcttacttgaacttgatcaattcaattaagaacatagagttagaattcgcaatggggacgttggggttctaatttctgaactgaactagggtaacagttgttcatcacctaggaatagggatgcggagctacagtgctataatatgattttttgcatgcttaatctgatagaattcactaaggaattaggttttcaactcagattaaagggctaattcactaaggaattagggattagctaatttaggaaaggcttattgctgagcaattaacacatgaacctcttatgatttgttctcttaaagcttaatttgacagaatcactaagggtttagggttctcgatcgaattaaagagtgaaatcgctagttatctaagatttacaaccataggagagatttatcatttgcaagcattaatgttagttaatcaatcaagcgagggagtagtaatcatagtggattgcgcctgaccacaattcatattccattggtaattcctataatcaatttactgcttgtgttacttactttcttgttttagttacgtaatccaacaaaaccaacaacaattctattttcgcattttctatttcaattttaatcataatagttagtttactgtgaaattactctcaatccctgtggagaacgataatttacttacctactttattacttgagaacgatcggtacacttgccgtattcgtaaatcccatcaagtttttggcgccgttgccggggactgaaacatcattttacagtaaattcgtagcttttgtgattgaaattttttgttactaattgcttcttgaagtttatgctagggttagttgattttgagaagttgcagtttgtaacaccccgtaggcctccgacgtgttatcataatcatatcagattagcgtataaaatatcaattatttagctcagcggaaacataggatcgttttcttgatacattatgtatggaatcacacaacagaaccataaactcacgcccctgctgatccagtttgtcaaaacaatataaataagacagataacagagctttaggcagagtaacaacaaaataactatacacatgtactcaggggaaagtctcatatacataatatcaaagttctgtataatttatacatttcaggttcacaccacacccggtgctacaaaagaatataatccctcagaaggggtatacaaaactatatcaaaaggacatcaaaatggagccctcaagctctctatactgctcctcaactaggcagcctagtctctgatgggcctcttgccctgagactgctcttctcgtcctgatggttcacctgaaaccacataaaccccacacggggtgagataatatatctcagtaagctcaagatccatggaggaatctcctccaccctggccccctatcatcataagcacagcaaataacacaaatagatggcccaccggcctagcctctgattcatataacattgtaacataacatacatgcataatcaacacaatagggcaggaggaatagccatctcctgtattaatgctataaaataggaggaattgccatctcccatatcagtatctcataacaggaggaatagccatctcctgtgctagtattcaataataggaggaatagccatctcctataacattttatcaaataggaggaattgccgtctcctgggaggaattgccatctcccataaccatctattggccaatagagctttctcagcataatcacagtacaattcaaacacagaggcatacatatatcatcacaagaatgcaaatatccatgcatgcattatgaaatgcccacaactcccctggagtgtggtgtgacacacaagatgggaatcacccccagggacactgaacttacctggtacaatatcactctgtggtctagtcccagctctgtggctcccgccaccagtaaactcaggatcaacgcctatacaaggcatatatgtatagctcatatcaatattcagaccacatacatcaatcacaagtatataaccatataagtcccctatcctagggtttaaccatttcagcctggcgcacactaggccataacatcatatcatgaaggctatagcatggcagaaaccatcagcctcctcacattcagaaaccacatgaatggcctaacctccaccatggtgccattcaactagcctcacaggctcataacagacatattcttggctctggaatggcctctacactaatgtagattcaacacacaggccacacagaccaaccacagagccaaaatccaaagtcatcagaatcaaaaactaaaagctaatccttcatctattctaagccctgatcatctttctcaactggaccctgggctaattctagccccagctcatatgggtcactattcacagaggccccccagaatcaaaatcaaacggagaaacgaggatctcttacctcagtggcgactccaaaggcttcaggacaactcactcaagcttccacgtccttcccacaccgtgggttcgagcctagctcgagttctctgagcctttctctctgaggttcctcttctccctcaatctggggtttccacaactgatgatgaaggattttagcgtttcaatcggtataaacaaggtttaaggtcactgggaagtgtttaggctgagaaaacaagtcctaggagctcaaggacttcaacaatggaggttggcttaagggaggaagaagaaatggaattccttccattttctcacgttttggcctttaaaaactggtctgccgacgttcccacgcgactcacttggcctcccacgcgtttcacttgagatggcagacagaaataccctttctgagccacttcccacgcgactcgcgtcgtctaaccacgtgactcgcgccataccttctggccttccaagcgacacgcgtggatcccacgtgactcgcgtggagcctcagagaaaaccatgttttctgggtcacttgccacgcgactcgcgtggatcttcaagtgactcgcgtgacatggcagagccatctgccctggaaagcacatatggcgcgtgtcgcgccacacttcaagtgggtcgcgccatataccagaacagccataaaacttgcattttaagcacctttcaacgaattctaaagctattacctttggcgccatcaacgccaatcctggtgccaccggcgccgcacccttagcagggttttctgacctgaatccccgcgcgatagcgcggggttaagcgccgaaaatgaaagtccttacattcacccctccttttaaggaattttgtccgcaaaattcagaaacatacctggtaaccaactcgggatacatctgcagcagctcctgctcccgcttccaagttgcttcttcaggtgtcctaccttcccactgtaccttaactatgggaatggtcttgctgcggatctgcttctccattctgtccaaaatcctcaggggtcttgtaggactcgtcagattttctctgacctggattgggtcaggctcaaccacgtgtgagggatcagctacatacttcctcaactatgacacgtggaacacattatgaagtcctgacaactggggaggcaaagctagcctatatgccactggtccaaccttctgcaggatctgatatggaccaatgaacctaggactcagtttcctcacacccaaagctcgtcctacgcccgtcactggagatagcctcagaaacacgtgatcaccctcctcaaactgcaagggtctgtgcttctgatcataatagcttctctgtcgactctgagccttcatcagcttgtctcggatcatcttgatctgctcagaggtctcttgaaccatctcaggtccaagtaactgcttctctcctacctctgtccaacatactggagttctgcaccttcggccatataaagcctcatagggtgccatacccaaactggcatgaaaactattgttgtaggagaactccaccagaggcagatatctgtcccagccagtaccttgttccaaggcacaagctctcagcatatcttccagagtctggatagtcctctccgtctgaccatctgtctgaggatggtaggctgtgctgagtctaagctgggtcccgaaagcctcctgaagcgcaccccagaaccttgaggtgaacttcggatcacgatcactgatgatactgtcagggactccatgaagtctcacaatctccctgacatataactgggccaacttctctgtagtgtagtcagattttacaggtaagaaatgagcggacttagtcagcctgtcaactatcacccagatggaatcatatccactctgagttctcggtaatcccaccacaaaatccatggaaatgctatcccatttccactcagggatctccaaaggctgaagtagaccagacggtctctgatgctcaatcttgaccttctgacacaccaaacacttagtcacatgttcagctatgtctttcttcatccctggccaccagaaactcctcttcaaatcatgatacatcttggtggctcctggatgaatgctgaactggccccgatgtgcctcagataggacaacatctctcagctcgcccttaggcaccacaatacgaccttggtattttaccaagtcgtgatccttccaagaaacatctgattgaccaatcatggccctcacatcctcatcctgctgctgagcttccctgatcctcctaatcagctcattatctaccttggtcctgctcaactcaagaccaggtgcaccttctgtcaccgctaggtgcatatctctgaattgctctatcagttgacaatcagagatcatcatacatgccgcagtcacattcttcctgctcaaagcatcagcaaccacattagccttgcctggatggtatctcaactcgaagtcatagtccttcaggaattccatccagcgcctctgtctcatattcaactccttctgatcaaagaggtatctgagactcttgtggtcactgaacactatcagcttggcaccatacagatagtgcctccatatcttcagagcaaacaccacagctgccaactccagatcatgagtaggataagactcttcatgaggtttcagttgcctggaagcataggcaaccaccttctgatactgcatcagcacatgatgtgttgcaaacacatcttaaatatagcattagtttaggtcatatttagagtaaaaagttagaaaatagtataataattaggcataattagtatattatgttatataaagcatttttaataccaattaagtgtttgcaggccaaacaagggagattaagagcaaataaaggagaaaacaagaactgccacctcacgcgcatcgcgccaaactcacgcgacccacttggacgtccagaaagaatcacgcgactcgcgccatgtttcacgtgagtcgcgtgaaatcttcaagaataagccattcaactctggaaagccacgcgattcacttcacaagtcacgcatgtcgcgctatctaacactgccatgtcacgcgactcgcgtggtgtcgcgcgcgagtcgcgtgaccctgatttcttgcctgaattaaactgatactgtttcgaaaataggacaaggcttatgataagttactataattaaaatattcgataaataagggtgtttttggagcttttagggagctagcagacagagacatagaaatatacacttccatagattgaatcttacacagaaaaccctaggaatcaagatcgaagtcaattctgcagaatcatgttctatccaattgttttggtgttcttgaggcctatggctaactaatctccttgttgtggaaaggccatgaacttatgagtttccctctgtaaattgactggtattaatgcatatgttatgtttgttttaattcttttccatgcttcatcataatcttgtttagaattgatcactctgaataggtatagagagttataattcgcaatggacacgttggaattataatatcagacttgttaagattaacacttgttcttcacctagacatagggatgcgtgagtgcggaggtataatatgttctttgatttcttgaattgactagtttcactaagacattaggttatgaaatcagttcaaagggttaattcactaagacattaggggttagctaaaataggaaagacttattcttcgaataaacataacacgaactcataagatttgttctttgacttcttagtttgacagaatcgctagaaggttagggttctcgatcgaattaaagagtgaaatcgctagttaatgctcttaagagtctaggattaacgaatttaggagagacttatcttatgtaagcttaaagataaaaccatcagtcaattgaaggaggtaacacttataagggattgcgcctgaccacaattacttctcattggtaaacttctcgttttaatttactgttttgtttaaattctgtccttaattcaatacaatcatccaacaaactcttgcgtattctgtttttcctgttcaatcaaaactttttacaattattgagaaatctttccaatccctgtggagacgatactttacttaccccttttattacttgttaaacgatcggtgcacttgccgttaatcgtgaaacaacaagtttttggcgccgttgccggggattggttacagaatttttcaataatttttaaaatttgagattgaacttttgctactaaccacttctctcaagtttttatgcgaagatcagctagtcctgaggaattggaattcgaccctgaaattgaaagaacacttcgaaagaggctagctcgacaaagaagaagagaagcggaactttttgactttgattcacttcctgaattcgagtcagaagagatggctgaagatcgacacaatcagcccccaccaaggctacgacctgaagatgaactgatggaggatattctggctcctatgttcacaagaccaaactctagtattgtgaggccaccaatccaagcaaaccatttcgatataaacccttcattgatatcattggtggagcgcagtcagtttggaggagatgattcggaagaccctcatgatttcatagacagattccttagaatctgtgacactattagacaccagggagtttccgatgatgctgtgagactgagcctatttccgtttgctgtgaaggacaatgctttaagatggttgaattgccaaacatctaacagtatagcaacttgggatgacttagtttcaagatttttcgcagagtacttctctatggacaaatacaatagattggtgaacgagatcaccaattttactcaaagtggaagagaaactctatgtaccgcgtggaagagattccaagcactagtgaggagatgcccgcaatatgacatgccagttggtaaacaagtcagaatatttttcaatggcatgactcccgaaacaagaatgatggtgaatattgcagccggtggtactataagatccaaaaccgccgcacaaacatatgagttgatcaagtctttggccagaactgagaacgaaagtcatacaactcagccaaagagggagcccattcaactgaatactaatgatgcaatgcttgcagagcaaaaaattctagcacaacaattggccaaattaagtgagaagatggaccgattgcaattttctgcagcacaagtgggcacaagccaaccatatgttatatgtgagtattgccaaggtgagcacgagtccaatacttgtcctattttagttggtgctgaccctgtgcaggtgaatggcgtgtggaatgatcaaaggcaacaacaacaaccataccagcagcaacaatatcagaggaacaacaattatgcagctggaaacaattatcctagaagatttcaaggaggtggtttagattacaagtccaacaactacttgcagccccctcctattccgaataaagaaccatccgagttagaaaaagcagtaatacagctaaccaaaaccaccactgaattcatagctgaaacaagagctcatcggactaatcaagatgcctcaatcaggaatttggagaaccaaattggccaacttgcaaaacaaatggcggagaggccacaaggtcaatttccaagtgatacggttgtgaacccaagagaacatgccaaagcaatcacaaccagaagcggtaaggtattggtaactccggagaagcccgaatcaaatgttccggtggtggagaaaaatactgcagcagttgagaaagaagaaagagatcatatgcaaccaccgaagaagtgggatttttcacgctttgaaaaacccccatatcctatcttgaccaagcaacaagaacagaaacgtcaatttctgaagtttttggagatgttcaaaaagttgcacatcaatattccgttcgcagaggcattagctaacatgccaaattatgctaaattcatgaagggactcctctccaacaaaaagaagctcaaggagtgtgaaaccatagcactcactgaagaatgcagtgcaatcatccaacggaagcttcctcccaaattgagagatccagggagttttaatattcccattgctattggtaatgttgacgtaggaagagccctatgtgacttaggggctagcataaatttaatgccactatccatgtgtaagtccctaggcataactgaattgaaaccaactagagtgtctttacaattagcggatagatccttaaggacaccctttggggtgatagaagatgtcctagttaaggtagacaagtttatctttcctgcagattttattgtgcttgacatggaaggggagagcaaaattcccctacttttaggaagatcattcctagctacagctagagccttgatagatgttgagcaaggcaaattagagctgagattagataacgaatctgtggtttttagtgtgtttgatgcaatgaaacaccctaatgatgagcatgattgttttcgtatagatgtcttggataatgctatttgtgcaggttttaaatctagtgttgcagcaatttatgaggaagatatttcacaggatgcaaccagcacagcacatactaatcatgcagaaaaatcaccagcattagcacaaacacagatgcagaatttggagtctacaactgcagaaatttatgcagaaaattctgcatcaggagatgaagttgaaacagcacatgcattggaagaaaaagctgcagaaatcagtcctgaaagtgcagaaacagcaccagcagagcagaaagttgaagagctggagattagagaagatgatatcctagccggtgcacccaaggttgaacttaaggaattaccagaacatttaaagtatgtcttccttggagagcatgagacttatccggtaatcatcaatagaggtttaaattggcatgaggaagtcaaactgattaaagtgctcaaggaacacaagtccgctattggctggtctatttcagacctcaaaggtataaatccttccttttgcactcataagattttaatggatactgacgtgaaaccagtaagacaacctcaaagaagaattaatccggtcatgaaagaagtggtaagaaaggaggttgttaagcttttggatgcaggtatgatctatccaatttctgacacaccatgggtaagtccggtccaagttgtccctaagaaaggtgggatgacagtgattcaaaacgaaaagaacgaattaattccatcaagaacaatcactggctggaggatgtgtgtagattaccgaaggcttaacgatgcaactcgtaaagatcattttccacttccattcatggaccaaatgctggagcgcttagccggtcatgactattactgtttcctagatggttattcgggatataaccaaattccagtagctccggaagatcaagagaagaccgcctttacatgtccattcggagtctttgcctatagaaggatgccattcgggttgtgtaatgcacccgccactttccaaaggtgcatgctttcgattttttcagacatggtagaaagaggcctagaggtattcatggatgatttttctgtttttggaccttgctttgatacatgtctaaccaatttagctaaagtgttaaaaagatgccaagaaactaacttagttttaaactgggaaaaatgccattttatggttagagaaggtatagtacttggtcataaaatatctgaaatgggattagaggtggatagagctaagctattacttattgagaaactacctcctcctattaatgttaacggtgttcgtagctttcttggtcatgcaggtttttaccggcggttcatcaaagatttttccaaaattgcaaaaccactgagtaaactgctggaaaaagatgcagaatttgtatttgatagtgcatgtcttaatgcattcaatgatttaaaacaaaagctaaccactgcacctgttataacagccccggattgggatttgccttttgaattgatgtgtgatgctagcaattatgcagtaggtgcagtcctaggacaaagaaaagagaagaagttgcatgtgatttattatgctagtaaagttcttaatgaggcccaaatcaattatgcaactactgaaaaagaaatgctagctgtagtatatgctttagacaaatttaggtcttatttagtaggatctaaagtaatcatttacactgaccatgcagccctgaaattcttactgcataaacaagatgcaaaacctcggttattgcgatggatgttacttttgcaggaatttgacttggaaattagagataaggcgggagtagagaacaaagttgcagaccatctctcccgaattcaacacaaagaactgcaagatggacctgagatggaaataaacgaagtctttccggatgagcacatatttgctgttggagtcactccatggtttgctgaaatggcaaactttaaagctgctagaatcattcctgaaaaattcacgtggcagcaaaggaagaaatttctgagtgattctaataagtatcactgggataatccttacttatactttaattgtgctgacaatattattcgtaggtgtgtacctgaaagtgaagtgcccgacatcctttggcactgccattcatcaaactacggaggacatttcggtgttaaccgcacagcacaaaagatcctacagtgtggctattactggccaactatctttaaggatgcaaaggatttcgtacaacagtgtgataactgccaaaggactggaaatgtttcgagaagagatgagatgccattgaacaacattcaagaagtagaattattcgatgtatggggcatcgacttcatggggccattccctaaatcatttggcaatcaatacatcttagtagctgtagactatgtatccaaatgggtggaagctactgcattgacaaccaatgatgcgaaagtggtgattaattttctgagaaagtacatcttcacaagatttggagtaccaagagctataataagtgacggaggaatacatttctgtaacaagcaccttgaaagcttgttagccaagtacggagtaaagcacaaggtagccacaccatatcatcctcaaaccagtggccaagttgagatttccaaccgtgagctgaagcgaattttagagaaaacagttggaacatcaagaaaagattggtccaagaagttggatgatgccttgtgggcgtatagaactgcattcaaaactccaattggtatgtctccatttcaattgctctatggtaagtcttgtcacctccctctagaacttgaacacaaagctttgtgggcaacaaaattcttaaactttgaactaaccaaatctaatgaaaagagattgttacagctaaatgagttagatgagttcaggttgagagcttatgagaatgcccgcatctacaaggaaaagactaaaaagtggcatgacaaccacattaggcacaaagaattcattccaggccaacaagtgctgctatacaactcccgactgaagctttttccgggtaaactaaaatcacgatggtctggaccgtttttggtaagagaagtctttccctatggtacaatagcgatttcagctgtagatagtgataaagtgtttaaagtaaatggatataggctgaaacattattttggaggtgaggtggatagaaactcaagctctataccacttcaagctaattccgaatgaattgacgtaaaagtctagcttaaggactttaaacaagcattgaattctgtatatagttaaattcagttgatagttttagttttcaattcatgcaaattaagttcatgcatcttaattagttttctaaattccttttaattttgtttaaataaatagatatatataatatttagtttaattaggagtcaattcaagcattaagtcagaaaagtgaagagcagaagagaaaatatgaaggtctccacacaaagcaagtcacgcgactcgcgtgaccatccacgcgaatcgcgttattaattctgtccattcgcgcgagtcgcgtgacacaccaagtgactcgcgccatctgcaaccacagcatttattatctgcataaattcacgtgtctcacgtgaacttcaagtatgtcgtgccagaggtcagtgccaaaatgcccaaattcacgcgacctacgtgatcaatgacgcgagtcgcgtcatagtaagaattcaaatagacaatcagggcaatccacgcgagtcgcgtggaaaaccgagtggatcgcgtgaaactacagaaacaaaatgcccgatcccacgcgagtcgcgtgaaaagtcacgcgactcacttggaacttactggaacatggcgcgagtcgcgtgaggtcgcggaatcagtttttaaaatagaaatcccagaaaccgcgcctcactcccactatttcctctcatccccttcattctcgcccagaactccctcaaaccctttaacccccaataactcccttaattccacttcctctataaaaaccacacattggtgttgtctttcagtgcaattctaggcgctaaaaatctctgcattcatcttcacaagcatcatggccaaggataaggtaagtgtcactttctgaacatcttaggataaccacatttgcaaatttatatatctaatcatatgcttctactccttctcttgtctgtggtctgaaatgctttagaaaaattttggattgtgcaatgtacccaacacacacactatgcttatccatttttatgcccaccacatgcttgatataatgcctgaatgagaatttaactacaataggcacttacatgaaagctttaagtctaaggttgattaataagcacgaatggtgtgagcacaatatctagaatggtcgatcaatttgatgaacatataccaagtggtcaagtagaaccatgtttgggtacaagtaaaaccaaaaatctggaaatgcataggccgagattaagccaacttagttgatttcacacatacatgaaccacacatatacataactagttgctgtgaatgtttaatagaactggaaagatacatggatgccctggaataagaatgaacatcgttgataactaaaataacacatgagtttacaaagtccaattttgcataagacttgataaatggagactcaaagtaagtacttgatctggattatcctcgctataattttggtaatgagaaatatgttaatgcctggaaataacttaggagtatagaatatacatgctaaacatgatataaaccataatgctgctacgatagtttaaaatcatatgtttggttttctgttgcaatgaataagatacaaatacatagcatgttcaaatcaaccaaagttgtcatagcaaacaactaaatttgggaatggggtgaaattgttcaaagtatggattagtcactgctaagaattgtagattaacactgtttacataagctatatccactaggttgttcatgaatcatacatatttacttagataaagaacaccaaaggtattaaatctgggaattgttattggattgcatatgcatattaaatcgttatacaattatatatgcaatacaccaaatctgggaatcctaagtataattgcttatttattatgaactttcacatgaaatgatagactgttccctgtatccttatgcatatttcattgaactgatgaacattgtttgaaaatttttctgacttgcagggtaaacaggttgaacaaaccaaaccatccaaaggaaagaagaaaatcacaggggaaggcagcagtaagaagagattaagaacagtcgattttgatgaactccgcttccgcactgcagagtgccaagctaaattcgattcttggtatttacccaagaatatcatcagggagcggaggatcatgtgggaggagttcccggaggaccatcccatcagacaggtcatcgtcagacgccggtggcagaagcttgtatccttcccagagcccagcagcagcatgatcctcaaggagtttctctccaatgtggatcaggacacggtttacaggaccagggtctcttgggtgaggggagtccaggtacctttcggggagaagaccatcgaggccctgtttgacacaaactacgatccatacgcctcctgtgacttcatcagattattctggcacatgcagccagatgcggttaccaagatgtataacgatgatgtcccagacttggccaccaccatccgtagagccattacttgcttatattcaacctggcagacgaagcccagcatggactatataccggacaaaatgaagaagtccgagctggttggagacgcagccttttggcacctgttcgtgaaccacacggtcatgccctctaggaatttgaccgatgtgaatgtggagcgtgccattctcctatatattctccggggtgcaggtaacctcatgatttcttctatcttatctgaccggatcctacagatgatacaggatgtaggcacacggtcctggctcggccactcttcactgattttacttctatgccggcatgcgggagtacacatagacgaggatgaggacatggatgtccctattacgccacttatgactatgaagacatatactactgccgtgagcgctgcttcaaacgagcaggtggttagagcttcaaagctcacacctgaggccatcgccgccgcctctcctcgagacattcctgcagatgatccccagccggaccagcatgaccagccagttccttcaccaccagtttctcctccaccacagacctcaccaccacacacttccatacccagtcctccaccacagacttctatgcctccaccatcatctttacctactcgcactcccctatacgaggattccccgagcttcatggacttccagcagttcgttaggacccagctccagttccagagtgagcagctcgccctgcagacgaggctgtggggagctgtttgccagcatttgggtattgacccgtcggagtatcagactccagttcctacacagccttctcagcccattcctgcagccacagaccccctggatttagcctcggatgcagacaccgcagtagaccggccattacattccgagcacacagacatggctgcagaggacagagaccctcatgactgagcaggacttttattttatttcagacttatgttttgagttgttatttttagtattctgcattttacatacattttcttttctgcacatctacatttcatagacatatttagtattcacaatttgattttactgcatgatattatatatagtacagttatagttatcatttttcttatcaatctgttttgacgatcaagaaatgaatgcgattttacgaataatgcttaaaaatttccaaagcgctatgaccaagtttgtggttgctggggacagcaacatataaatctgggaatggttacgcattatttcgcaaatcacaatcaaggatcaaaagaagtctaacagaatttttgaaaatttttcatataatcagaatttttttcaaacaattaaaaataagcagcacacacaaaaccttttcagattaagaaatgaatgaactcatgaatagacggatttctctgaattaagtggatgaaataagagacatggactgcatgatgcatgagtagaatttgattgatagtatttggaactcatgttgaatgttgaaatgatgccagatgtgccgtcgattgagaacgacttgagtcacagcacttgtaaggaattgagccaaatgtcggtaaattttcttctgagagactccatgctttatagtattctagaacttgatttgtttctctaagtgcaggtgtgacttgaaatgattaaggcatgatttgttctaaaaactagggccaaattaaccaacctgaataaaattttcctttgaacctgaaatttgagcctgaaaccttcatttcaataacccaagattaagccataaccaaatgtatctaaccttttgaggcttaagaaggtgaactaagtccatgtcagaaaagtgctaagaagaaagaagagaagagaaagcaaatgaataaactgaaaaagttgaaattatcagctagaaaaattcaaagagctgcaaaaatgtgtatagtctgattacaaaaatattggataagaaaaatgtgaaaaagtcaaaagaaaatagtattatgttattttgaataaaagtaccagtttgaagaaagaaagacaagagtatagaagactacaaaaagcttggacttaaggaactagaataagcctctgattgagccactttttccaaattaattcccacctctagccaggccacattacaagctttaaaagaccttctgatcaagtcatgattgcatctattgagaatattttcaagcctatggtaatgctttaaatcatgttgagtaggagggtaattataacctgaaacacttgagtgaatgagtgaatatatacatccgtgaggaaaactcaagtagttcttaagttgatatcactgaaagcatcatggaagattgaactgagtaaattatacattcatgatgattttatgattaagaagtgtagtttttgttgattattgattcatgcttatgtcttagaactctttctattgctgaggacagcaagtttcaaatctgggaattgtttgatgtgttgcaaacacatcttaaatatagcattagtttaggtcatatttagagtaaaaagttagaaaatagtataataattaggcataattagtatattatgttatataaagcatttttaataccaattaagtgtttgcaggccaaacaagggagattaagagcaaataaaggagaaaacaagaactgccacctcacgcgcatcgcgccaaactcacgcgacccacttggacgtccagaaagaatcacgcgactcgcgccatgtttcacgtgagtcgcgtgaaatcttcaagaataagccattcaactctggaaagccacgcgattcacttcacaagtcacgcatgtcgcgctatctaacactgccatgtcacacgactcgcgtggtgtcgcgcgcgagtcgcgtgaccctgatttcttgcctgaattaaactgatactgtttcgaaaataggacaaggcttatgataagttactataattaaaatattcgataaataagggtgtttttggagcttttagggagctagcagacagagacatagaaatatacacttccatagattgaatcttacacagaaaaccctaggaatcaagatcgaagtcaattctgcagaatcatgttctatccaattgttttggtgttcttgaggcctatggctaactaatctccttgttgtggaaaggccatgaacttatgagtttccctctgtaaattgactggtattaatgcatatgttatgtttgttttaattcttttccatgcttcatcataatcttgtttagaattgatcactctgaataggtatagagagttataattcgcaatggacacgttggaattataatatcagacttgttaagattaacacttgttcttcacctagacatagggatgcgtgagtgcggaggtataatatgttctttgatttcttgaattgactagtttcactaagacattaggttatgaaatcagttcaaagggttaattcactaagacattaggggttagctaaaataggaaagacttattctccgaataaacataacacgaactcataagatttgttctttgacttcttagtttgacagaatcgctagaaggttagggttctcgatcgaattaaagagtgaaatcgctagttaatgctcttaagagtctaggattgacgaatttaggagagacttatcttatgtaagcttaaagataaaaccatcagtcaattgaaggaggtaacacttataagggattgcgcctgaccacaattacttctcattggtaaacttctcgttttaatttactgttttgtttaaattctgtccttaattcaatacaatcatccaacaaactcttgcgtattctgtttttcctgttcaatcaaaactttttacaattattgagaaatctttccaatccctgtggagacgatactttacttaccccttttattacttgttaaacgatcggtgcacttgccgttaatcgtgaaacaacagcacacacccaagtcctcgcttggatgcatcacagaaaacctcaaagactccctctgggtctggaagagtcaataccggagctgtggtcaatctctctttcaactcaagaaaacactgctcgcactcatgggtccagacaaatggaacccccttccgtgtgagtcaagtcaggggtacaaccaactgagaaaacccctgaatgaatctcctgtagtagccagccaatcccaggaaactacggatctcagacacgtccttgggcctctcccaagacatcactgcttctattttgctgggatccacagatacaccagcggctgagatcacatggccaaggaacttcacctctgtcaaccagaattcacacttggccaacttagcatacagctgcttgtccctcaagatctgaaggactgtcctgagatgctcggcatgctgtgactccgtcttggagtagatcaagatatcatcaatgaacaccaccacaaactgatccaagaaaggtctgaacaccctgttcatataatccatgaacacggctggggcattcgtcagaccaaaaggaatgacctgatactcatagtgaccatatctagaccggaaggctgtcttaggtatgtctgcaggcttgatccgtatctgatggtatccggatctcaggtcaatcttggagaacactctggctcccctcagctgatctagcagatcatcaatgcgaggcagaggatacttgttcttcacagtaaccttgttcagctgcctgtaatccacacacaacctcatactgccgtccttcttctttacgaagataaccggtgctccccaaggcgaaacactcggtctaatgaattgcttggacagcaggtcttccagctgcaccttcagctccctcaactccagaggagccatacgataaggtgccacagatattggtcccacaccaggaaccaaatcaatggagaactctatctccctttctggtggtagctgggtaatctcctcagggaacacatccctgaactcgctcaccaccgggacctgagacaaatcatcactgggtttatcctctgtcacacccaagaagatataaccctgagctccctccatgattgccttgcgagtttgcaagactgataagaatgaggcagaactcgaactagtcccctcagaaggtactacaaccctcttctgacaacagtctagcatcacaccatacttggtcaaccagtccatacccagaatcagctcaagggtaggcatagctagacaaaatagatcaaccacataagctctgccctcatacaaaaactgcacgtccttgcagcacgtgctcacctggcatctttctctagatgctgtgataacctccatcggaggagcaaaactgtgcttaggcaatctaagcctatctacaatcacatcctgaatgaaggaatgtgtggctccagaatcaaacagcactctaatatcacagtcatcgatcagaacggtacctctgatcagatctggagctctggctgcttcccttgcatctacagtatacacccgtcctgctgtgggtgccatcacctccactgaagcagcctgtgcccgagtctctgtccgggtgcactctctagctatgtggcctggcttgccacatctaaaacacactatctggccggaggaacacaatccccagtgctcaaagaaggaggatatgttacctatggggacaacaataaaggaagaattattgggcaaggtgttgcgcgatttatgcgaatacggcaagtgcaccgatcgttaacaagtaataaagtaggtaagtgagttatcgtctccacagggattggggtaatttttacaataatattaattctaaatgattggaaaataaaacagcaaataaagagataattgttgatgttggatgattggttgaataaaaacagaaattaaaatgtaataaaatagtaagaaaatttaccaatggaagaaacaattatggtcaggcacaatcccttttgttcctacctccttcacttgattggtttattatcttaagtcacacacatgataaatctttcctaaattcctaaatcctagaactactagagtcataaccagcgatttaactctttaatttgatcgagaaacctaaacccttagtgaatctgtcaaactaagtattcaaagaatatatctcatgtgatcttgttaagattattcagagaataagcctttcctaagttagttaatccctaatgtcttagtgaatcaaccctttaacctaattcaaaaacccaattccttggtgaattctattaagttaagcatgaaaaagaacatattataaaatccgtagccacgcatccctatgtctaggcgaagaacgactattattctaaacatgtcagaaattagaatcccaacgtgtccattgcgaatcctaaccctcaatacttaaatagaatgaccaattccaaataagaataaaacattaaatagcacagagtagaataaaataatcaaaacaacattagaatcaataccaattcaagttacagaggagttacatcagttcatggccttcccacaatacaagttcagcctgccataggtttcaagaaaccaaaagctatcacataagacattcttgattgaccttgccttgattcttgacctccaaaggtttagagaaaagaaaggaagagtagagaggtgtcagtgtctaagtgtgtcctttgaaccccccccagaggcctttatttatagatagatctaattaaggtaacaggacctattttctgttccaaatctaaatcaaatcttcttaattaaggaaactaaatatatttataaaatcacttaattaaggcaactaatcctaatataatatcaaatctgaaaatatataatttaaataaggaaacagcatcaacctcacgcgacccgcgcgcgattccacgcgagtcgcgtggactggccgaaaagatggcgcttgtcgcgtgaaatgtgcagtgcctcgcgtggagtaacagaagagaattccttatttctttgagtcttcacgcgacccgcgtgatactccaagtatgtcgcgtggaatagcagcgttgaaatgcttaaatcttgaagttcccacgcgacccacttgagtaacggcgctacccgcgtgatcttctctggtcttccaagtggcccgcgtggatgttggcgcaactcacgtgatactccagaatttgttttcttctttctttggcctttattctcctcttttgtcctgaaaatgcataattggtattggaatgagataaaatagaatattattaataaactaactaaaactaaactaattcctatttatttaatcaaaatataagctaaaactattctaaaaataagatgtgtttgcaacacatcacaaggcaacataggagacaacttaaccactaagatcaaggatgtgctttatgttgaagggctaaagcacaatctactaagtattagtcagttgtgtgacaagggtttcaaagtcaccttcaacaatgagacttgcttgatacatgaaggcaaaactggaaaagttgcacatattggcaaaaggaaggaagaagaagaagaagatgaagcacaactagagttcaatcaagatgtagccacacgtaaacacaaagattggaggatcacaagagatttatcattagacaacataattggtgaagtatctaagggagtatctactagatcttctctaagaaatctttgttgtagtatggcttttgtatcacaaattgaaccaaataatattgaataatccttactcgatgaacattggttaattgctatgcatgatgagttaaatcaatttaaaaggaataatgttttggaacttgtccttagaccttatactcacacacctattggcactaagtgggtttttaggaacaagctggatgaaagtggcatcataataggaaacaaagctagattggttgcaaaggggttacaaccaagaggaaggaattgattatgatgaaacttatgctccagttgctagattagaggccataaggttacttcttgcatatgcatgtatgttgaattttaaattgtttcaaatggatgtgaaaattacatttcttaatggttatattgatgaagagatatatgttgtcctggttttgtagatcatcaatatcctaatcatgtttatagattgagaaaatatggtttgaaacaagctccaaggtctttgtatgagaggttgagcaagttcttgcttgatcaatcattcacaagaggagaagtggataaaaccttgtttatcaaaagaagagagaaagacatactcttggtacaaatttatgttggtgatattatttttggttccactaatcattctttgtgtaaagaattcttagctagcatgcagaaagagtttgaaatgtctatgatgggagaactcacattcttcctaggactacaagttaagcaaatgaagaatgaaactttccttagccatttcaaaatattgcatggaaatgataaagaagtttgacatggaaaattgcaaagctgcagcaacaccaatggcaacttctacctatctagattcagatgaaaaagggaaaagggttgatgagtcaagagatagaggaatgataggatcattgctttatcttacagcaagtagacctaacatttgttaagtgtttgcttgtgtgctagatatcaagccaatcctaaagagtctcatctaactacagtaaaaattaaagtatctaaagtctacaccaaaagtggggctttggtatccaaaaggtacaacaatcagcttaataggattctttgactctgatttttcaggatacaaattgaatagaaagagcacaagtggtacttgtcatctattaggaagctctataatctcttggcgttgcaaaaaacaatcatgtgtagccttgtcaacagctgaagctgagtacatatcagctggaagttgttgtgctcaaagcttatggttgaagcaacaactctaagattttggtgtggaatttcaacactccacttctatgtgataatacaagtgctatcattatctccaagaattcaatcatgcatttcaggacataacacagagataagacatcacttcatcaaagatcatgtgcaaaaaggtaacatcaaaattgagtttgttgaaagtaacaaacaattggctgatatttttaccaaacctttagatagagatagattctttactctaagaaacatgcttggtatattagatgaatctagtatatgttgattgacattcctgtgctagttactctgtaaatgactggcttaaatactgcgtgaaagacattaactcaattggaaattgaatacatgctagatgctgctaaatctgattttttttattattaaaaagcttatataatcgattaccacaaaaccttaatcgattatttgctcatctgatgcttctataaaatgaatcaaggctgttgcaatcaattaaaccattgaaataatcgattattcactactcgagtttctggaaaatcaagttcactatggaataattgattaaatcgatgaaataattgattacatgaaataatcgattacttaagtggttactgcaaaaatctgacagttttgaaactgcccaactgtaataaaccatgatttgataggatctaagccttaatggtagtggttaagggcacaacaactatattttcaaatttacaactgcccattatatcaaaattgcctacaaatagagacctttgagacttgaaaactcacaccttcaagccttgcaatcttctattctctgtctcaatattctagctctgaaaccatcttgctttataagttctgaacaaaatttttcttctcttcttatttctcaaattcgtgctcaattactctctcaacatgtctacctccaaaagagctaaaacttcaaagagaaaagctcaagcccattcctcaaaccctgtagtcagcagacttgatcattggttctccaatgaagctgacaaaatgaactacctccagttcaatgctaccaagttactctgccctccaaagttcttgaaccttggttggtttattgaactaggatttcatttccctcaaatgttagaacttcaaggtctaacaaaattcgttgaaatgcaagagactttttaccctgacctagaaaaaagtcttttatacctgttccaaaatctctatgcatggaacaatcctcacccaagtgaatggagtggctatggagattactctagaaatttggcatgaagttgttgggatctcctttgatggagaaagaaggtttgatgaagaagcagagggttataacagaatggaaacctatagaggtatgctcatagaccctcacatgaatcttaggctaagattaagtacaggacctatgacacatgaagataggctcctacactatatcatcacctatatcctcactccaagatccaccaatcatgcacaagccacagatgatgatctccaaattgtttatggattaaagaatggaatcaagttaaattggatccatatacttcaagagatcatgcagaaatccaagagattggtaaatcctagtagtatgcttatgcatatgcacaatctatatattgaaaaattcaactataggcctatgcttcacatcttctgcaagcttctgaatttagtcttatctttttaaagcacacaaaaagaaacctttggtagctaagtttagataactatggtttgcttctttatggtctgccatcattaaaactttatcttctggagggattttgcctcaacaaagaccgatttaatcaaaacaaatctactttttaaagagatgtgtttactttcccacattcataatctccatttcaccacctctatcacaagctaccaattaactatccatttttctctgatttacccctactggtaaatcgacatttaaaaggaatagtattcaccttataatttaaagtttttgaggcatgtaccaaccatcatgcctccacatttacccctactaacatacttgatcttatgaaaattaaccttcaaataaaagaagtttcaaaatagacttaatgcccttaattttttcctaacttttctcccccattattagtgtattttagcaaattgatagttagaaatacaagatccatcgtcacccactttaagagcataaaaatgctatatccactacctccttgtatagaacactaattctttcaacaaatgtcaagaaataaaaaaagagacaaaggattaccttgtctctcttcgcatgctaaatccatctgttgtccgccatttacaaaataaaggctcttgtagtagctagacattctctaacccaacccctttacttctcatcaaagcccatgtgttccatcagatagcaaacaagaacttttagctattaaatcacaagtcttctcaaaatctaccttactcactgaaaatactattgtatgatttggtattcctaccaacgtaacacctaacaattgatggaagcccgtggaaagtctatgacgtgggataattttagtgcgcattttctggagaagtattttccagctagtgtaacgccctatcaatcatcagggtcattaccaaacataaacatcaatcacacagaaaattatcagagtttaagcagtttggaagcataaacaaagagtgacgtcatcaaaggtcactatcataaacactgtacatataatatggtgaatatacatataatctgtgtttaagtacaaaactgtacaaatacattccctcagggtacaacaaaactaaaccaaaggcagaatacaaaatatcagagccacatgctcaagtcatctatgcctaaggtttcaaaacaccgctatccctgcacaggcttcttgccttgggatctatcagctcctcctgaggattcacctgcaaaacatatgccccacacaaggggtgagatataaaatcccagtaaactcagggtccttgaaggtatttccttcccctggttcactttcatacacatatacatgaaaatagtatatcatcatcagtgaaatcattaaatcaatcatcatcaatacaggttcacctgacgacaatcagtaaatcactcaaccaatcctcatgcacaatcaatgcacatctacctgactacaatcaggctagactcatggcatacagccattcatcatatccaacactatcccactgaggctacatctatgtatataggaacatctccaaccaggaggctacatctatatactaggaaacatctcatagcaggatctcaatgcatctatcagaggctacatccgtatatataggaacatctccacctggaggctacatctatataacgggaacatctctttataaggaggctacatctgctgatataggaacatctccaccaggaggctacatctatatcgcaagaacatctcctaacctatctcaatacaattgcctgaggaggctacgtctgtagatataggaacatctccattcgggaggctacgtctatatcacaggaacatctcacatcaggtcttactcaatcacatgtcatctatcctactaccgtaggatacaacaatcaaccatgcaggtcataagctaggcaaaccgtagccatacatatcaaccacccaatctcagggcgtagctcacagaacaagcatcacctatcaatgtacatcaaattccctttcacagggtacaacacaacattcaacaatcaatcaaacaatacacaattttcacatatatatatgtataacattacacaaaaccatcatcctaacaggataatgatggaacatagcaaaggatgcacaaacaagaaccaagagcttacctgctctaggcaaaataccggctctcccggcctcgtggtcaccaccactagaactatcaagctcacgtcctacagaaaccaaatacacattgtatcagtaacggtcctaagccgttagatcgaaaggaaactacaattccttccacataacccataacaatcacttcacaagtgattctcagaccctcagaaggatcctactcagcctgcacaaggctccagagcctcttctaagactctgatcatagcatatccctgcttatacaaatcaattccaaacttctcattatcaccaattccagcttacaaacaacatctatactatctcatgagcaactttgtcaactgctctaaggttcatactagccaaaaaatcagtcctttacctctgttcatacagacacagagccaaaatcaaacttcatcaataatgatgatttaaagctctaacttcatcagaataaccctctgaacacaaaactctacagagctcaagcctaataacggctttaacacctccaaaaacacctcttaaggtattcaaaaccaaccaaaacccaaacacataatcaacggctaaggctcgagtttcttacctctgtgtagtccagacacaccagggaatcactttccctaaggtagatcgctcaatcaaagcctccttcgcctctgattcttcgattccaaggactcccttagaaattgcgatctcaccatttaccgcctcttgtcgagaataaagctgggtcactagcttatctcgaggctctgaacactttctcagttgggtcagaggtgtttagatgagaaatggagaagatatgaagctccacaagtcatcaatggccgtttctctctctctctctctcttcctttctttctctcagcccaaatgagctatttataaggctgaaacgaaggtcccgcgcggctcgcgccacttcctgcacggatcgcgccaaaggctcgaataacccgcgctgtccacgccatacccacgcggatcgcgtgaactggccgcaaggattagtctgattcaagcttcccgcgctgatcgcgccctattccgcgctggtcgcgccacaggttcgaacaattcacgttgttagcgccacagccatgcggttagcgtgagatggccaccagcattggcctgattcacccattccatgcggatcccgccgtgccccgcgctaaccgcgccacaagctcgaatcagccacgctagtagcgctatgtccacgctaatcacgccatctgttcgaatctgttttctacttctcttaagcttccttgagaatttctaatgcatgattatggtttcttaatctcaagcttaatcctatgctcaaaattcaaggtattacattacaccccccttttaagaattttgtccgcaaaattaagatcatacctagtaattaactcgggatacagctgtaacagctccttctctcgttcccaagtcgcttcctcaggtgatctgccatcccactgaaccttgataataggaatggtcttacttctgatcttcttctctgtgcggtccaaaatcttcactggtcgtgtagggcaagtcggattctctctgatctgaatagtgtcaggctccaccacgtgtgaaggatctgatacatacctcctaagctgcgacacgtggaatacatcatgtaatcctgacaactagggaggcaaggctagcctatatgctaatggtcctactctctgtagtatctggtaaggaccaatgaatctagggctaagcttcctcacacccaacgcccgtccaacaccggtgactggagacagccttagaaacacatggtcgccctcctcaaactgcagcggcctgtgtttatgatcgtaaaaactcttttgtcgactctgagctctcaacagcttatctctgatcaatttgatctgctcagaagtctcctaaaccatatcaggtcctaacagctgcctctcacctaccccagacgaacatacaggagtcctacacctccgaccatacaaggcctcataaggagccatgcctaagctcgcatgaaaactattattatatgagaactccaccagaggtagatatctatcccatctgactccctgctctagagtacaggctctcaacatgtcctctagcgtctggatggtcctctcagtctgaccatctgtatgaggatgataagctgtattgagtctcaactaggttccaaacacctcctgaagcgcactccaaaacctggaagtgaacttaggatctctatcactgacaatactctcaggaaccccatgcagtctgataatgtctctaacgtatagctgagccagcttttctgcagtgtagtcagtcctcacaggcaagaaatgagcagacttagtcaatctatcaacaatcacccagatggagtcacatccagtctgagtcctcggcagcccaactacaaaatccatggaaatgctatcccatttccacttaggaatctgtaatggctgcaacaaacctgacggtctctgatgctcaatctttaccttctggcatactaaacatctggacacacactcagctatgtctctctatccctggtgtaacaccccgtaggccttcgacttgttatcattaataatatcaaattagcgcataaaacacagtttataaaacttagcggaagcacagaatcgcttttcttgatacattatgtatggaataacaaattcatcagataacacacacaaatcatataacatgcccctgctgatccagtttcttatatcaaacatcatgaagacagataatttaagcatacaggcagataaacaagtgtacatatttgtactcaaggaaaagtcacatctcctatcatatcatagttttgtacatatatacattagagtccacaccacacatcccgtggtgatacaaaagaatatcagccctccatgagggtatacagaactatacatcaaaatgaaatcaaaacagagccttcaagctctccatgcggctcctaagtcaagcagcctagtctcaactgggcctcctaccctgagactgctcttctcttccagaaatatcacctgaaatcatgtaagccccacacggggtgagataacatatctcagtaagctcagggtctttgggaaatcattctcaccctggcccacagattcacaacacataaacaggcaaacatatcacacatggcccactggcctgtcactctggcctcatcatatcaaatcaatatcataatctcggctcatgacaggtggcagagctcctcaatgcctggcggagctcctcaacgccctgacggagctcctcaacgtcagtacctgtcatgatgtggcagagctcctcaatgccaccggcgaagctccttaacgcccaaaatacacggcggagctcctcaacgccggtatttatctattggccaacagatatatctcaatcacagcatgcatatatcaaatgcagatacatataaatcaacataacaatgtcatagccaatgcatgcagtatgaatcatgaccaacaatccctaggagtgtgctgtgcaaccaaaacgggaattcatccccagagaacactgaacttacctggtaagggattactctgaagttccttcccaggtctgtggctcccgccaccaacagtctcagaatcaatgcctaatcaaggcataacaatctcatatcaaaaccagtccacatacatacaattcacataacatattataatagaattcccctatcctagggttcattcacgctcagcccacacacaaggctactctcagaccacacaaggtccatcagggcaaaatacacgccatctgagtcatcctagactcactacatatatatatatatatatatatatatatatatatatatatatatcctaagctttactcagccccataatacaattgtcatcagaacggactgagtttcactcacagccctactccactagcctctcggctcagaacaccacaatcaaggctctagcctatcagagaaccatcaacaagtgactctacacaagtcacacaggcatatacagagccaagattcaaagtcatcagaaacaaaaactgaaagctattccttcatctattcattgccctgaacaagtttctctacaggaccctgggctaattctagcctcatctcactgtgggtcacattactcagggaatcccaaattcacaaagaatcaagagaattcaggtttcttacctcagtagcgaccaaggagacctcagaacagcttcctcaagctctaatgtccgtctcccgccttaggtctcgcctattctcaagttctctgaggtttcctctagagaattccaactctcactcacaagaggtttgaatagaggaagatgaaggatactagctttacataggtttctaacaagattataagtcacaggaaggtgtttaagtctcaaaacaaggtcctaagaagcttgagcattccaacaatggaggtttgaggcgtggggaggaagaagaggctgaattacccttcattttcgcattttgccctttaaatactcagcctgcccgaactcccgcgcgatccgtgccacctctcgcgcgatctgcgccacaatgtcggtgaactcgcgctatcagcgccatccccgcgctaaccgcgtgaacctttcgagacctttggcgctacccgcgccacctctggcgctgtccgcgtgaaattctagagaaaattggttttccaggccacttcccgcgctaatcgcgtggtgtctggcgcgacccgcgctggctggaaaacctttggcgcccctggcgccatccgcgcggcacccttaacagggttttctgatgtgaatccccgcgcgacaagaatgagggtccttacacctggccaccaaaatctcctcctgaggtcctgatacatcttggtagcacctggatgaatactgaactggcctttatgggcctcagtcagaactgcatcaaccatctcgcccttaggcaccacaatccggtcctggtacatcattaaatcatcaggctcccagtgaaactcctgtcggcccaacagatctatcatagaatcatcctatttctgagcctctctgatcctttgtatcaactcattatcaatcttggtcctactcagctcaagaccactggtacccttagtcatagtcagatgcatatctctgaactgctcaatcaactcacagtcagagatcatcatgcaggcaacactcacatgcttcctgctcaaggcgtcagctacaacattcgccttgcctggatggtatctcaactcaaatcataatccttgagaaactccatccatcgcctttgtctcatattcagctctttctgatcaaagagatatttgagactcttatgatcactaaataccaccaactgggcaccatacaaataatgcctccatacctttagagcaaaaacaatagctgcaagctctaagtcatgggtaggataattctcctcatgtggcttcaactgtctggaagcataagccactacccgcttctcctgcatcaacacacaaccaagaccccgcttggaagcatcacagtatacctcaaaacatccctcaagatcaggaagaatcaacactggagatgtggtcaacttctccttcaaactcaagaaacactcctcacattcatgagtccatacaaatgggttacccttcctagtaaggcgagtcaagggtaataccatctgtgaaaacccctgaatgaacctcctgtagtatcctgcaagaccaaggaagctacagacctctgaaacactcttgggcctctcccaagacatcacagcatccactttactaggatctactgatacaccctctgcagagagcacatggcccaggaatttcacctctgaaagccaaaactcacatttagacaatttagcatacagctgatgatctctcagaatctgcaaaacaattctaaggcgctcagcttgctcctcctgactccagaaatagatcagtatgtcatctataaataccaccataaactgatccaggtatggtctaaaaactctgttcatataatccatgaacactgttggcgtgatgagtcactatttatcactatttactcatctttctgtactcattttaatccctaattgtgtttaaatgtttatattttgcactgtttctcatttaggacttaattggaccgataattcagatttcaattaatttggattattttaagtttaattattctaatttgattttcagggtagattaataattaattgggcttggaattaattcgtggacttgaagattgggatgccgcgcgtcaacattaatttcagaatattttatttcggttttaattgtatattcgtttttgggccaaaactgttgaaaaagcccattttcgtttgtgagagcagtctctatttaattgggaactgtgcccatgcaaaggaagctcagctatttttcgttttagggtttctctgcttcttcttttttagttttttgtttctgctgagtactctgtgactgaatttcgtttctgtttggatttttaatttgggaatacaatttcgtttctgttagtgtttgttttcatttctgttccttctaaattagttttcgttttctgctattccgttttctgtctgcttcttctattttcgttttcgctttctacttctatttcgtttctgtgctatttcgtttctattcttaattttgtttaatgtttagtttcaatttaaattgcgtttctgttgttaatcacgaattaatggaaggctaaacctagggttggaccctaggacagattgcagacctttaatggaggttcttgttcttctaatttgttttctgcttgttcttccttgttagggtttttgttctgtattttttcgaattggattcatgcttaatgattctggtattgattgattcagaatctcaatttgcttaattctgagagtttgccctaacgaggttcacgtttgcttaattcgtgtaatgacgttttaggttaatcttcgcttagttgattaatctggactgatgagaattaagtagaacaaattatctttcgtgaaccaaggaaataagaggcgcaatctgttctaagggtctgacttgtttttaatcactgcaaattaatttcgtgtttctgttttaatttaattaaccctgcattctgtcaaaaactccccttgcacgtttaatcccttaaacatagacaattggtccttgagagacgacctaggagtcacttcctagtactacatttaaaatcatattaatttggttgagtacgatctcgatcaaattttggcgccgttgccaaggatcattagttctgtttaagggttctgtgtttatgtgtgtgtgtgttttctgttttgtttgtgttagtgttgtgtttgctttgtgttctgtgatcattgttcattgttcattgttcattgttgcaagtggtagagaagcaaagtagcatttgagttaagctgagaatttcactctgatcaccaatggaacagtaactcgaattgtgctttgttctgttgcctataccagttcatatatcacttcttatttttaggtgtggtgtgctataattgtgctttgagtcttttgtctcttgcatatttggttgtgttgatcaattctgcaggtccaattgatgcattgagcaagcaagtcgcgcaccaggaagcagcagtcgcaatgaacagtaacatgaatagtacccaggaattaattgtgatttttagttttgatagttagacttgttatttttgcttcaatttttttttggtaacttcttttagcttatatttgttaggaaaaataccgaaagcatctaaaatagttcagattttgagtggcaaaaatttgggattcattttttttgccaaaacttaaaacggtcataactttcaatccgaccgtcagaatctgacgtattatatatgcttttggggtagaaaaaaaaaatctatccaccccagcatgacatgcttgctgaccaccgttggattttcaaaaagaggccgttttctattttatttttatttttgaagttttattttccttttttctatattttcttaatctgttttatttagttatcctttgaattaggttttgaaatttggtgtgctgtcttttcatgattttagggtgttgctcacaaaattttagctcatttggactccgtttgagtatagctctagttttacctctctttgtgcttgtctgccaaatgcttgatatgttgcatgtagtgcatgactagaggcaatccaggagaccttcaaccctttgatcctgagatagataggacttaccatagattagttaggcattctaggaaattttcattagattctgtaaccttagatagtgttagtttaaattctgagtattttccttctgagcattctactagctttaattatgtgcatactatttctgattctgctgattatactgagaataatatggctcaacctccacctcgtgagaggactcttagggagttggctgcacatgatttcacctatgagagcttgtgcattcagtatcctgatgaggatgttccatatgttctcaaaactggactaatatacttgcttcctaagtttcatggtcatgcaggagagtgtcctcataagcatctgaaggaattccatatagtctgttcaacaatgaaacctccagatgtccctgaagatcacattttcttgaaggcatttccacattcattagagggagtggcaaaggactggctgtactaccttgctcccagatccatcactggttgggatgaccttaagaaaatgtttctggagaaatttttcccagcatctaggaccactgccatcaggaaggatatttctggcatcaggcagcttggtggagaaagtttgtatgagtactgggagagattcaaaaagttgtgtgcaagctgtccacaccaccagatttctgagcaactccttctccaatatttttatgaaggacttaacagcatggagaggagtatgattgatgctgccagtggtggagcacttggtgatatgactcctgcagaagctaggcatttgatagagaagatggcttctaactctcagcagttcagtgcaaggaatgatgctattgttattcgtggagttcatgatgtagctgctaattcttcttcatctgcagctacgaaattagagggcaaattagatgctttggtgaatttagtcactcaacttgctgtcaaccaaaaatctgcttcagttgccagagtttgtggtgtctgtacttccagtgatcattatactgatgcatgtccttctctgcagcaccctgttagccctgatgctcctcaagcctattctgcaaacatctataacaataggcctcaacaacaacaacaacagaattatgatctgtccagcaacagatataatccaggatggagaaatcatcctaacctcagatggtcaaacaaccagcatcagcagcagcctccactaccaccatttcaaggttctgctggcccaactagaccatatgtgcctccactagtccagcagcagtaccagaggcaacaaaatgatgtacctgttccaccagcacctcaaccttctacttctgaaccttcattggaggagctagtgagacagatgactttgcaaaatttgtaattccagcaagagaccagagcttccatccagagtctgaccaatcagatggggcagatggctactcaactcaattaggcacagtcacaaaattcagatagactaccctctcagactgtgcagaatccgaaaaatgttagtgtcatcacattgaggtcgggaaaacagattgacatacctgctgcagtgtccccacctccatctataccagttcctacacctgcacctgtaccaatacatgagcaaagtgatgaacaaactcgtgcaagtgaaccttcttccagcaccagttctgatttgcagcagcagcctcccatccctcttccatttccccctagatcaattccaaacaaaaagatggaagaggtggataaggaaatattggagatcttcaagaaagtagaggtcaatatacctctgcttgatgccatcaagcacattccgaagtatgcaaaattcttgacggagctgtgcactaataagaggaagaggaagatgactggaattgagagagtcaacatgggcagaaatgtttcttctatgacaggtaattatgttccaaatatgcctgaaaaatgtgaggacccaggtacttttagcataccctgtattattggtagtaatagatttgataaagctatgcttgatttaggtgcctccataaatgttatgcctctgtccatttttaaatctatgtctcttggtcctttgcaacctactggtgtagtgatacagttggcaaataggagtgttgcctaccctacaggtttcattgaggatgtcttagttagggttggtgaattgatttttcctgctgatttctatgtgcttgatatggaggagggattctcccatggttctgtccccctcattttaggcgaccatttatgaaaacagcccgaactaagattgatgtgtatgctggtacattgactatggagtttggtgatattgttgttcattttaacattcttgatgccatgaaacatccatctgaaaatcattctatcttccgtgctgagattcttgatgatgttgttgatgagtatgtttctgatttttattcttcccatgatacaaagcaatgttttctatctgatctttatacttctcttgcatgcatggaatctgaatatgaatctgacaatgaatccagctttgattttcaatctgaacatatgtcccattttgatgttagttctgagattaattctgatgtattgggtgttgtacctctgcatataaattctttagagtcagaatgtactaaccatgtttcaggaagtacacaagaatctgacttgcaggttgaggtataggctgtggaacccattcttcttccatctctggttccttcttctgatcagcccacccccattccagaattaaaacctttaccggaaaacctcaagtatgcctacttggagagtgatgagagattgccagtgatcatttccacatcccttgatgctgatcaagaggacaagctgttgcaagttctgaaaaagcgtaagaaagccatcggatggaccctggcagatatatccggtattagcccatccacttgcatgcacagaatatcattggaggatggagctaaacccgtgagacagccacagaggagactcaacccggtgattctggatgtagtgaagaaggaggtgaccaagcttcttcaggctgggatcatttatcctatctctgacagtcagtgggtgagtccagtccaggtggtcccaaagaagacaggcctcactgttgtaaagaatgacagggatgagcttatcccaaccagagtgcaaaacagttggagagtctgcattgattaccgaaggctaaaccaagcaacacagaaagatcatttttcgctgccattcattgaccagatgcttgagcgtctggcaggtaaatctcactactgtttccttgatggtttttctggctattttcaaatccatattgctcctgaggatcaggagaagactacattcacctgcccctttggcacttttgcctataggaggatgccttttggcctatgtaatgcccctggtaccttccagcggtgcatgcttagcatattctctgattttcttgaaaattgcatagaggtgtttatggacgattttactgtatatggatcctcttttgacatgtgtttagacagtctggataaggtgctgaatagatgcattgaaactaaccttgtcttgaattttgaaaaatgccatttcatggtagaacagacgaacgtatttaagcaattgtcgttctgtaagaccataatgaaaacgcaatttttgtttttcttctaaacgaatacgatattgagattttttactggagcgcgattgatttctaagttcgcttgtcatttctagtaagggcatagaggtagatcctgcaaaaatatctgttatttcacatctgccttacccctcttgcgagcgagaggttcgttcttttcttggtcatgcaggtttctataggcgctttatcgaagatttcagtaagaaggcccttccgctatccaatctgctgcaaaaagatgtggatttcaattttgatgatagctgtaagaaagcgtttgatcaccttaaggaagcattgaccactactcctatcctccaggcacctgactggacagtcccatttgaattaatgtgtgatgcatcaaattatgcattgggagctgtcctggcacagagagttgataagctgcctagagtgatatactatgcttccagaactttggatgctgcccaagcaaactacactaccactgagaaagagcttattgccatttgtttgctcttgataaatttagatcatatttgcttggttctcctgttattgtttatactgaccatgcagctttaaagtatctgttgaaaaagactgactccaagcccagactgatcagatggatgctcttgctccaagaatttgatttggatatccgtgaccggagtggagctcagaatttggtagcagaccatctcagtagaattgaaggagctgagaataatgatgaggtgttacccatacaggataattttcctgatgaaaatcttttgactgtttcttctgtttctaattccaccccttggtttgctaatattgtcaattgtttagttgcttctgtttttgctcccttggcatcacgagctcaaattgataaattaaagagtgatgctaagcattatatttgggatgacccctatttgtggaagttgtgcagtgaccaggtgattaggaaatgcataccagatcatgagatcaattcggtcttgcagttctgtcattcctccgcaccaggtggccatctcggtatacagaggacagctcgcaaggttcttgattgtggtttatactggcccaccatcttcagagatgcggcgaagacctgtagcacttgtgagcagtgtcagagagcaggaggatcctttacatggagacaacagatgcctcagcaacccatgctattttgtgaggtgtttgatgtctggggtattgatttcatgggtcttttccctgcctcttttggtttctcatatattctattggctgttgattatgtttcaaaatgggtagaagccagagctactaggactaatgacgctcgggttgtggtagattttgttcgatctaacatattttgcaggtttggaatacccagagccatcattagtgatcaaggaacccatttttgcaacagatccatgcaagctttgctcaagaaatatggggttgtgcatcgaatctctacaccataccatccccaaaccaatgggcaagctgaaatttccaaccgagaaatcaagagaatcttagagaaagtcgtccagcccaacagaaaggattggagtataagattggacgatgctctttgggctcataggactgcctacaaagcacccataggaatgtctccttatcgagttgtctttggcaaggcatgtcatctgcctgttgagattgagcatcgagcctattgggctgtgaagatctgcaacttttccatggatcaagctggtgaggagaggaagttgcaactaagtgaactagatgagatccgccttcaagcttatgagaactcaaagttctacaaagagaagaccaagaagttccatgatagcctgatagctaggaaagacttcgaggttggccagaaagttctcctgtacaattctaggctcggactcatgggtggtaagttacggtcaaagtggattggaccctttgttgttactaatgtttatccttatggtacagttgaaatccaaagtgagtccacaggaaagagcttcaagatcaatggacaccgtgtcaaaccattcctcagcaatccctccttgctagatgcagttgtggaggagatatctctgtttgatcctgcctcccttccatctgaacttttgttgtgcctcattgaggacaatgtgtaattttaagtgtggggggggggagagactgtttctttttgttttgtttttgctgtttttgttttgtttttgtatagttttgcatgttttttttttatttctgggttttaaataagtgttgacacctacttcatgcttagataagagctgcttcatactgtatggtttgaaatccatgtttttctttacttggaaagatgattatgaagtttgaaaggttgatttaactgtgacagatataccctgtgtgaggatttgagctatctgttctttcatgtgtgctatacctcttgattgcttgcacagttgccttgtcttgactctgtttgatatttcttggttttcatgcatgtttggatatgattaaggcatttttgttctgataagcctctggccaaataagcttaccctgaatttaattcctttgacaaccctgttgagcctaatttcctttcttttgtttgaagctcattacaagccttaagtgaaaaacaatgattaccttaaccttagggaattttggagctttggaattgttttgggaataagtaagggggtgcatgtatatattgttttggatgatacctctggcctgttggtttactctgatgttcagcttattcttcatgtttctatacatatatcagttttaaataaaaaaaagaaaaaagaaaaagaagaaaaaaaagaaaaaatatagaaatgaaaaaaaaaataataaattgaagaaaagttgttgtgtttgaagcaaaggaaaaggaatggtgttagaggctgattagagatttttgggtttgttttcgtgcttacttcttaattattccccattgttcctctagtccctctggtatgcagctacttatcccatattttatcctaccccatgtccttgaccacattacaaccctgaaaagaccttttgatccttatgtgcatgtttattaggtgttaatgatagaggctttacaagtctatctgttgcttgttttcatgagtgttttgagagtatacaagttgcctaaacacttgagagatacagtgtgtgatacagtgcatctggtgaggttctgtcgcttttaattcacctcttgagcggattgattgttttgataagttttgaatgcttggatgaatctcataagtgtgtagtttctctgactctttgtgtgttggaaattgtcaattcctttctctttcccagtttcattgaggattgtgcataactgtttattttatggtgtgtcattctttctttaaaatctttagaattgttccttgctctatttttttgattttgcccaggagtgcaaaaggctaagtatggggggttttgatgagtcactatttatcactatttactcatctttctgtactcattttaatccctaattgtgtttaaatgtttatattttgcactgtttctcatttaggacttaattggaccgataattcagattttaattaatttggattattttaagtttaattattctaatttgattttcagggtagattaataattaattgggcttggaattaattcgtggacttgaagattgggatgctgcgcgtcaacattaatttcagaatattttatttccgttttaattgtattttcgtttttgggccaaaactgttaaaaaaagcccattttcgtttgtgagagcagtctctatttaattgggaactgtgcccatgcaaaggaagctcaactatttttcgttttagggtttctctgcttcttcttttttagtttttcgtttctgctgaatactctgtgactgaatttcgtttctgtttggatttttaatttgggaatacaatttcgtttctgctagtgtttgttttcgtttctgttccttctaaattagttttcattttctgctattccgttttctgtctgcttcttctattttcgttttcgctttctacttctatttcgtttctgtgctatttcgtttctgttcttaattttgtttaatgtttagtttcaatttaaattgcgtttctgttgttaatcacgaattaatggaaggctaaacctagggttggaccctaggacaaattgcagacctttaatggaggttcttgtttttctaatttgttttctgcttgttcttccttgttagggtttttgttctatattttttcgagttggattcatgcttaatgattctggtattgattgattcagaatctcagtttgcttaattatgagagtttgccctaacgaggttcacgtttacttaattcgtgtaatgacgttttaggttaatcttcgcttagttgattaatctggactgatgagaattaagtagaacaaattatctttcgtgaaccaaggaaataagaggcacaatctgttctaagggtctaacttgtttttaatcactgcaaattaatttcgtgtttctgttttaatttaattaaccctgcattctgtcaaaaaccccccttgcacgtttaatcccttaaacatagacaattggtcgttgagagacgacctaggagtcacttcctagtactacatttaaaatcatattaatttggttgagtacgacctcgatcatggcacaatagtcaaaccaaaaggaatgacctgaaactcataatgaccatacctcgacctgaaagctgtcttcggaacatctccgggcttaatccgaatctgatggtatccggatctcaggtctatcttggagaacacacaagctcccctcaactgatctaacaagtcatcaatacgaggcagaggatacttattcttaatagtaaccttattcaactgcctgtaatcaatacaaagcctcatacttccatctttctttttcacaaagaggaccggtgctccccacggcgacacactcggtctgataaactctttggacaacaagtcctcaatctgtgccttcaactcctttaactctaaaggagacatgcggtaaggagctatggatatgggtcccacacttggaaccaaatcaatggagaactctatccctctgtccggtggaagctgtgtaatctcctcagggaacacatcaacaaactcgcctaccaccggaatctcagaaatatccataccctgtctctcccccgccgtactcagtaacagatacccctgagctcctcctctcagctccttacgagcttgtaacactgaaaggaatgctactgagctcgggctaatatcatctgaagacacaaccaccctcttacgacaacaatccagcataacaccatatcacatcagaaaactgagttttgggtgcgacgctgatcgcgccaggtcctttggctgtggcgctggaggcgccaggatggcgcgagtggcgccagaggttttcagccggcgcgggtcacgccagaggccgcgcggtcagcgcgggaagtggcctggaaaaccaattttctctggaatttctcgcggagagcgccacaggtttcgaaaggttgacgcggttagcgcggggttggcactgttagcgccagtccaccgccattgtggcgcggatggcgcgggaagtggcgcgaatcgcgccagacctcgggcaggctgagtatataaagggcagaacgcgaaaatggagggggagagtgagttttcttcttccttggacctccaacctccattaatggcagttccaagctttctgggaccttatatactagcctaaacactctcctgagacctataatcctgtttgaaccgattagaaagctgaaatccttcatgttttcttctatcacccattttgagtgagagtttgaattctcaagtgagaaacctctgagaacttgagagtagtcgagacccaaggcaggagacaggcaccagagctcgaggaagccgtcctgaggtcttctgggtcgccactaaggtaaggaattcgagttctcttggttctctgtgaatttggggttttctgagttttgtgacccacactgagctggggctagaattagcccagggtcctgtagagaaactcgttcagaacattgaatagatgaaggattagctttcaatttttgattctgatgactttgagttttggctctgtgttacctgtgtggcctgtgtaatggtcacttatgcttgtcatctgatatgccagagccttgtatatgttcttttgagcctgtgtggctaatggaatggcgcctggagtgagactgaatcactccagtgatgttctgtagttgagactaatgagagaatatgcccaggcttgtagggcattgagcttacattgattcagaggttggtattcagcctagatggaccttgtgtggtttgagagtagcctaggctgagctggattaaaccctaggataggggatttttagatatattgatatgtgaaatgatgcctgtggtcttgagattgatatgaaattacatgtgccttgaataggcgttgattctgagattattggtggcgggagccatgtaacaccccgtaggtctccgacgtgttatcattaataatatcagtttaacgtttaaaacatagtttataaaactcagcggaagcacagaatcgcttttcttgatacattatgtatgaaacaacatcaactcatcagagtcacacacaaagcataaaagcacacccctgctgatccagtttctcataacacataaaccatacagacagatatctatcagaaataggcagatatatcactataccacagctatactcgggagaatatgtctcataaacatataagaaatagttctgtacaaatatatatatcagtactcacacctcatcgggtgatacaaaagaatatcagccctcacagggtatacagaactatacaaatcatcaggagtacacacactccatcccttctcaagggtaccatatataaacaaaataatccaaaactgagcctacacgctccatctgctgtcatcagccaagcagaaacgtctctactcgggcctcctgccctgagactgctctcttcgtccagaagagtcacctgaaaagcataattccccacacggggtgagataacaaatctcagtaagctcagggtccatggaggcttctcctccaccctggcccacttccataacacatacatcaggcaatcacaaacaaatggcccactgacctggctctctggccctcataacaacataagcatagcatacaaacatggcggagctgcctcaacgcctggcggagctacctcaacgcctatatcagtgggagtccggaactcgcacctgtgccatcccattgggtgctaacccttcgcatggatgcacaacatatggcacctccaagaatagaaggagctacctcaacttctaatcccctggcctgtgggaatcaatcccctgggagctacctcaaccaagagccagccatgctaggaggaaaaccatctcctagggaggtccatatctatctattggccaacagatctatcacagtcatatcacagcacaatatcaagcacatatgcatacatacatcattatgaggatgcaactaccaatgcatgcatcatgaaatgaccaccactcccccggagtgtggtatggcacacaagatgggaattcatcccccagagacactgaacttacctggtaaggtctcagtcagcaattccttcccaggtctgtggctcccgccaacaacagtctcacaatcaatgcctaaccaaggcatatgcaatttcacatcaaaaccagaccacagacatgaaattcacaatatatatatatacatcatacagaaatcccctatcctagggttcaagccaactcagcctacactaggctgctctaagaccactcaaggtccatcaggatggaatacaatccatctgagtcattctagactcgctgcacatatacataactaagccttactcagcctcataatttaattgttatcagaaaggggctgaggttcattcaaagccctgctctaccagcctctcagctcagagcatcacaatcaaggctctagcctatcagagaaccatcaacaagtgactctacataagtcacacaggcatatacagagccaagattcaaagttatcagaatcaaaaactgaaagctaatccttcatctattctaagccctgaacaactttctcaactggaccctgagctaattctagccccagctcatatgggtcactattcacagggacccccagaatcaaaattaaacggtgaaacttaagtttcttacctcagtggcgaacccaacagcctcagaacagcttctcctagcttctatgttccaattacgctgtggttctgcgccaagctcgagttctctgtgtaacaccccaaaattcagggaattacagacaattattaagagtaaaatgttaaggaaaggcagtagaaaatttagggcaaaatgacataaatacccctgaacatttgtaaaaatgacgtttatgcccttagggtgaaaatgacaattttgccctaaaacaattctggaaatgaccaacatatccctagatattttagtaagatatttactaggagaaattatcaaaatatccttggacaatttcaaaaatgactattatgtcctaggatggaaaatgacaattatacccctagacatttttgaaaaggaccaatatatcctagatattttgataaagatatttttgggagaaaattacaaaaaggtccttgaacaaattgggtaattaccattataccctaaggagataaatgaccaaaatgtccttgaagtcaaaactgaccagataaccttagaaatttgtaggaacctcactattggataaaatacttttagataatcatgaattagtcaggttggaggcgaaaaaccccaggatagaatttctacaaattttggaaattagattaaaaagagcttaattcagactaccctaggtatcagaaaattatgagaagggtatgagtataatctatggaattttctcttaattgtgggaggaaaaggattcttaactaagttagtttagtaattttaataattaaagataatatggaccaataagaattagaagttagctattatgggaaaattggattaatatgaatttctaaactaagccttgaccgtatgatacaagatcaatggagaaaaactttaagaaacttcaagaacacacatatggatagttaagaggcttggaaacatgtcattggtccacttgtatggtaaaaaatttaatttaagtagatttttatcttgtttccttaggaagaacacgtgggaagctctaaacattatttcaaagatctcaacggtcaaaagctagacatgtaagttaggagtataccattaaacttttaaaatgatccaacgggtaatgagttcggaataaaaatttttgtaatacgggttttgacagaatttttagaaacaagactaaaactattccacgattaagttaaaaactaaagcatattgtcacaaaatgaagcctagaccgtgcacttcatggaacaaggtagaaaactttagaaaagtgtggaatcaagacatgtggacagccaaagagtaagggcaaaagctaattggaccaagtagaaagtgaactaatcattactttgactaataaaacactaaaaatctataacacctaaagcataagaaaactacacgaatggtactccaatttagctaggaaccgtgcaaataaatcagccaagggaacatgtagagtcttcatgaataaggccacttggaggcaagcaattgcctagccaataaaaagctaaccaagtggaaagtaaggtaagatttttagcacaaaaatctaattaaggaggtggacggaccatgggctttaaaaatcatttgaagaagcaattttagaagggagaggaccgtggaatatggctggtctaagggtgtggacgtgtgaaagccttgccacttttaaagccattccaaaatatttctaaagcaaaacaagcctagccgtggaaaccactcacttatatcctattttctttcattttaaccttctttatcatactttgtaccaagagcatcaaatcttaggaagcaagctcacacggaattagtttgttagaggatgattaaccaagttttagagaagaagaaacaaaggaaagatgtccacaaatcattaggagcaaggagctgtctaaaagcttgagaaaaacaaaggtatgggaagtaatttaatgaacatagattagatagttgattggataatttaacctttatttctttagatttaagttatgcttttatttatttggtaaggtttagaagttggtacaccatgtgtttgcaagaatgtcacaataaagcaatatagtacataggtcataattgaaataagtaactccaactaacttaaaaactaattaatttagatcaacaaggaagtaactaattagattttcggccataaattactttgctgtatgttattagaatgctgtaaattattaggttgttgtatttattaatggatattgctgtaagtgatgtataatgattttgtatgctattttatgttgttgtatatggctgtaacttaattatgctgtatattattaggatacggtaggatattttagtaggatggttgtatttaattaagtggtaggttgctgattttgtatttaattaaatggtacgttgctattgttgcatttaattaagctgtgtatattaagttgttgatgtaaagctgtatgtcattttattacgttgctgtatgctgttgtacattttattagactgctgtatgttgctgttgctgtaataaataagttgctttatttgaggatgttgctggaagttattttattatgttgctgttgtagtagttgatgctgtatatttattggattgctgtatattttatttggttttggttgctgtatgctgttacatgatgctacatttaattaggttgctgtatgacattagtatgttgctgtaagttgctgtacatttaattaggtgctgtatttaatgattgttgtaattatattactgtatttaatgtgctgtatgttattttgatatgttgactgaagcacactaagtgtttgataaaagatttcaaagaaataaaataagtatgtgatctttcaagacatgttgtttggtgatgttatgttttgaggttgagaaatttataaaggtgggaatccttgtattattgaagatgttgtgattatttatggattccaaatgtgtgataaatcatggctgtatattgagattaatatgtaaaagttttatgtgataagccatgagttgtaatgatgtttaaagactggataaaataaatcattcatgcattctcatatgcatacgcctggcgggggttaatccgtggagttgatgcctgacgggggttaaaccgtggagttgtttgtcagatagttagaggaactgagtatgagcgttcagacagtgaggagtctgagctgggggatgcttcggcagtggggaactcacgccacccatgatgatcacatgtagagtgggtgactttcctgtgcaccactgtgacatcctgactgatcatgcaagttctggaccagtgattggggctatctgactgtggccactgatgatgattttatgagaagctgagatctcagtcatgcatcatttaaataagaaaccatgcatcattcatcatatattggttctataaatgttattttatgatatcacatatatccgctatttaatctaaatctgttatgtatctgatatgttattctatttcctatcaattatctaattatgtttattaaaatacttacccgagttgtatctgtggtttgacacctgtgatgaccccaatttatttgggcgagtgatgtgttgcaaacacatcttaaatatagcattagtttaagtcatatttagagtaaatagttaggaaatagtatgataattaggcatatttagtatattatgataaataaagcattttaatatcaatcaattgtttacaggacaaaacaggggagattaagagcaattaaaggagaaaacaaggactgcaaccccacgcgtgtcgcgccacttccacgcgatccacttgaagctccagaatgtatcacgcgactcgcgccatgtttcacgcgagtcgcgtgacaactgcaaggaaaagccatttcagctctgtaaagccacgcgacccacttggggactcacgcgagtcgcgtgaatacttcaaggaataagcaattcagctctgccaagtcacgcgagccacttcacatgtcacgcgaatcgcgccattcaatactgccaagtcacgcgtgtcgcgtggtgtcgcgcgcgagtcgcgtgacactgatttcttgcctgaattagagaagatctgttttaaaaataaaccaaggcctaggataagtttctgtaattaaaaacactcgataaataggggtgttttaggagtttttacacacactggtagacaaacaacatcagctaacagcctgggagatagaattagacacttctatagattgatagcaaaccctaggaatcaagattgaagccaattctgcagaatcatgttccatccaattgttttggtgttcttgaggcctatggctagctaaattcctcattgtggaagggccatgaacttatgagcttacatctgtaaattgactggtattaattcatatgttatgtttattttaattcttttctatgcttaatcattatcttgtttagaattgatcactctgaataggtatagagagttataattcacaatggacacgttgggattataatatcagacctgttaagattaacacttgttcttcacctagacatagggatgcatgagtgcggaggtataatatgttctttgatttcttgaattgactagtttcactaagacattaggttatgaaatcagttcaaagggttaattcactaagacattagggattaactaatataggaaagacttattctccgaataaacataacacgaacccataggatttgttctttgacttcttagtttgacagaatcgctagaaggatagggttctcgattgaattaaagggtgtaatcgctggttaacgctcctaagagtctaggattaacgaatttaggaaagacttatcttatgtaaacttaaaggtaaaactatcagtcaattgaaggaagtaacgcttataagggattgtgcctgaccacaatcacttctcatctggtaacctttcagaatttatttactgttttgtttctttacttaattcaacacaattttccaacacaactcttgcgtattttattgttctcgtttaatcacgaattttataattattgagaaaaacttccaatccctgtggatacgatactttacttacccttttattacttgttaaacgatcggtgcacttgccgtttttaaacgcatcagcgtaaatctgacaacaagtttttggcgccgttgccggggattggtaacagaatttttcaataatttttgaaatttgtgattaaacttttgctactaaccacttctcttgagtttttatgcgaagatcagttagccctgaagagttagaattcgaccctgaaattgaaagaacactccgaaagaggttagctcgacaaagaagaagagaagcagaacttttcgattttgattcacttcctgaattcgaatcgaaagagatggctgaagatccacataatcagcccccaccaaggctacggcctgaagatgaactgatggaggatattctggctccgatgttcacaagaccaaactctagtattgtgagaccaccaatacaagcaaaccattttgatataaacccttccttgatatcgttggtggaacgcagtcagtttgggggagatgattcggaagacccccatgattttatagatagattccttagaatctgtgacactatcagacaccagggtgtttccgatgatgcagtgagactgagcttatttccatttgctgtaaaagacaatgcattgagatggttaaattgccaaacctcaaacagtatagcaacttgggacgacttagtttcaaggtttttcgcagagtatttctccatggacaaatacaacagattggtgaacgagatcaccaattttactcaaagtggaagagaaactttgtgcaccgcatggaaaagattccaagcactagtgaggagatgtccgcaatacgatatgcctgtaggtaaacaggttagaattttctttaatggcatgactcctgaaacaagaatgatggtgaatattgccgccggtggtactataagatctaaaaccgccgcacaaacatatgagctgatcaagtctttggccagaactgaaaacgaaagccatacaactcagccaaagagagagcctattcaattgaataccaatgatgcaatgcttgcggagcagaaaattctagcacagcaattggccaaattaagtgagaagatggacagattgcaattttctgcagcacaagtgggcacaagccaaccatatgttatatgtgagtattgccaaggtgagcacgagtccaatacttgtcctattttagttggtgctgaccctgtgcaggtaaatggcgtgtggaacgagcaaaggcagcaatcgcaaccataccagcagcaacaatatcagaggaacaacaactatgcagctggaaataactatcctagaagattccaaggaggtggtttggattacaagtccaacaactacttacagcctcctcctattccgaataaagaaccatccgagttagaaaaagctgtgatacaactcaccaagaccaccacggaattcatagctgaaacaagagctcaccggaccaatcaagatgcctcaatcagaaacttagagaaccaaattggccaactcgcaaaacaaatggcggagaggccacaaggtcaatttccaagtgatacggttgtgaacccaagagaacatgctaaagccatcacaaccagaagcggtaaggtattggtaactccggagaagcttgaatcaaatgttccagaggtggagaaaaatactacaacagctgagaaagaaaaagagaaagttgcagaaaattcggaagaaagagatcctatgcaaccaccaaagaagtgggatttttcacgctttgaaaaacccccatatcctatcttaaccaagcaacaagaacagaagcgtcaatttctgaagtttttagagatgttcaagaagctgcacatcaatattccgttcgcagaggcattagccaacatgcctaattatgcgaaattcatgaaagaactcttgtccaacaagaaaaagctaaaagagtgtgaaacaatagcactcactgaggagtgcagtgcaataatccaaagaaaacttcctcccaagctgagagatccagggagttttaatattcctgttgctattggtaacattaatgtaggaagagctttgtgtgatttaggggctagtataaatttaatgccactgtctatgtgtaagtccctaggcataactgaattgaaaccgactagagtatctttgcaattagcggatagatccctaaggacaccctccggggtgatagaagatgttctagttaaagtagacaaatttatctttcctgcagattttattgtgcttgacatggaaggggagagcgaaattcccttgcttttgggaagatcattcctagctacggctagagccttgatagatgttgaacaaggcaaattagaactgagattagataatgaatccgtagtttttagtgtgtttgatgcaatgaaacaccctaacgatgagcatgattgttttcgtatagatgtcttggatgatgctatttgtgcaggttttaaatccagtgttgcagcaattcataaggaagaaacctcacaatatgcaacccgtacaacacctaataatcatgcggaaaaatcaccagcagcagcacgaacacacaagcagaatttggagtctacacttgcagaagtttatgcagaaaattctgcagcaggagatgaccttgcagcagtgcatgcactagaagaaaaagctgcagaaaccaatgacgaacatgcagaaacaacaccagctgagcagaaaattgaagagctggaaatcaaggaggatgatatcctagccggagcacctaaggttgaacttaaagaactaccagaacatctgaagtacgtcttccttggagagcatgaaacttatccggtaatcatcaacagaggattagattggcctgaggaagtcaaactgattaaagtgctgaaggaacacaagtctgctattggctggtctatttcagatttaaaaggtataaatccttccttttgcactcataagattttaatggatactgacgtgaaaccagtaagacaacctcaaagaagactcaatccggtcatgaaagaagtggtaagaaaagaggttgttaagcttttggatgcaggaatgatctatccaatttctgacacaccatgggtaagtccagtccaagttgtccctaagaaaggcgggatgacagtgattcaaaacgaaaagaatgaattaattccatcaagaacaatcactggctggaggatgtgtgtcgattaccgaaggcttaatgacgcaacccgtaaagaccattttccacttccattcatggaccaaatgttggaacgcttagccggccatgattattattgtttcctagatggctattctggatataaccaaattccagtagctccggaagatcaagagaagacagcctttacgtgtccatttggagtcttcgcttatagaaggatgccatttgggttgtgtaatgcacccgccactttccaaaggtgcatgctttctattttctcagacatggtagaaagaggtctagaggtatttatggatgacttttctgtttttggaccttgttttgatacatgtctaactaatttagctaaagtgttaaagagatgccaagaaactaacttagttttaaactgggaaaaatgccattttatggttagagaaggtatagttcttggtcataaaatatctgaaatgggattagaggtggatagagctaaactcttacttattgaaaaactacctcctcctattaatgttaacggtgttcgtagctttcttggtcatgcaggtttttaccggcgattcattaaagacttctccaagattgcaaaaccactaagtaaactgctagaaaaagatgcagaatttgtgtttgataatgcatgtcttgatgcattcaatgatttaaaacagaaactaaccactgcacctgttataacagccccggattgggatttaccttttgaattaatgtgtgatgctagcgattatgcagtaggtgcagtcctaggacaaagaaaagagaagaagttgcatgttatttattatgctagcaaagttcttaatgaagcacaaatcaactatgcaactactgaaaaagaaatgctagctgtagtatatgctttagataagtttaggtcttatttagtaggatctaaggtaatcatttacactgaccatgcagccctgaaatttttactgcataaacaagatgcaaaacctcggttattgcgatggatgttactcttgcaggaatttgatttagaaatcagagataaagcgggggtggaaaacaaagttgcagatcacttatcccgcattcaaaatgacaaactgcaagacggaccagagctagagataaatgaagcctttccggatgagcacatatttgctgttgaaaccactccatggtttgctgaaatggcaaacttcaaggctgccaaaatcattcctgaaaaattcacctggcagcaaagaaagaagtttcttattgattctaataggtattattgggacaatccttatttatactttaattgtgctgacaatattatccgtaggtgtgtacctgaaagtgaagtgccggacatcctttggcactgccattcatcaaactacggaggacatttcggtgttaaccgcacagcacaaaagatcctacagtgtggttattactggccaactatctttaaggatgcaaaagatttcgtacaacagtgtgatagctgccaaaggactggaaatgtttcaagaagagatgaaatgcccttgaacaacattcaagaagtagaattatttgatgtatggggcatagacttcatgggaccattccctaagtcatttggcaatcaatatatcttagtagctgtggactatgtctccaaatgggttgaagctactgcattaacaaccaatgatgccaaagtggtgataaattttctgcgaaaatacattttcacaagatttggtgtaccaagagccataataagtgacggaggaacacatttctgtaacaagcaccttgagagtttgttaaccaaatatggagtaaagcacaaggtagccacaccataccatcctcaaaccagtggccaagttgagatatccaaccgtgagctgaaacgaatcttagagaaaacagttggagcatccagaaaagattggtccaagaaattggatgatgccttgtgggcgtatagaactgcattcaaaactccaattggtatgtctccatttcaattgctctatggtaagtcttgtcacctccctttagaacttgaacacaaagctttatgggcaacaaaattcttaaactttgaactaaccaaatctaatgaaaagagattgttacagctaaatgagttagatgagttcaggttaaaagcttatgagaatgcccgcatttacaaggaaaagactaaaaagtggcatgacagccaccttaggcacaaagaattccttccaggccaacaagtgttgctatacaactcccggctgaagctttttccgggtaaactaaagtcacgatggtctggaccctttctggtaagagaagtctttccctatggtacaatagcaatttcagccataaacagtgataaggtgtttaaggtaaatggatatagactgaaacattattttggaggtgaggtggatagaaattcaagctctataccacttcaagctaacattgaatgaatagacgtaaaagtctagcttaaggactgtaaacaagcattagaattgtatataaattaagttcaactgatagtcttagattttgattcgtgcaatttaaattcatgcatcatattttactttaatttatttcaattttatctaaataagtagtaattttagttaaatccttccaattaggaataggtatagctaatggttgagaatttagagagtggaaagaaaatataaaggaaaacagaaaatgcagagtcacgcgactcgcgtgaccatccacgcgaaacgcgtcatacatactgtccattcgcgcgagtcgcgtgacatatcaagtgactcgcgccatctgcaataatagcattaaatgactgcataaattcacgcgactcacatgagactcaagtgagtcgcgccagagggcagtgctaaactggtcaatctcacgcgacacacgtggtagatgacgcgactcgcgtcatagttagaatttcaacagactatcaggacaatccacgcgactcgcgtggagcaccaagtgcatcgcgtgaaccaacagaaccaaaatgcccaattccacgcgagtcgcgtagagagtcacgcgacacacgtgaactatactggaatgtggcgcgacgtacgtgataatggcgcgagtcgcgtgaggtcgcggaatcagtttttaaaataggaatcccagaaaccgcgcctcacttccactactccctctccttaccttagttttcgccctcaatccctaaactctctcaaacgctttcaatcaccataaaactccctcatctcaatctctctataaaaactatacattggtggtctctctctgtgcaattttagactttaaaaatctttgcattcctattcacaaagaccatggcgaaggataaggtaagtaccaacttctgaacactctaggatagccaccaattcttattttatacatcatcatatgcttctacttattctttttgtctgtggtctgaaatcttttgaaaatttttgggtttagccatctacccaacacacatatcatgtgtatctatttttgtgcacaccaactgttcggtaaaaggcctgagtgaatttttgaaacgaatttgtatccaattaaaaccactaagcatatttttgatcaaactgaataatgtcaaggtaattagtgattggtataatctgcaagtctatatttggttgttagagatacctagaataagcaaagttataaatctaggaatacctaaacataggacaggtagtgctaaattgtgttgatacctcaagtgcaagaaatatacatacatgcattgatgattcccatttgcatgacttgttgaattgaaataaaattggactaaatttgtaggagttgaagatactatacctgaattcaagtgttctttaattttcatgatacaattgatgcaaaaacacttgactctactctattacctcaataccaatttcactactcttgaatccatacttgtggcttacattatatgaataaaattcacctaaggctatagcaaagatcaaatctgggaatgggggagcatagaaccagacattaatgatatttaaccttaaagtagtatgttgatcaaaatagcgctgtcaatatccatatgcttctgataatctgaaatgtgctcttataaaaaatttgtggtatgctatgtaataatcacactaagtataaataaatgagactaaccaaggtgacaaatctgggaatcctaagtgtgattacttgagtaagataccttatgcaattgtaattcactgatataacttgcttaaaactttttgatttgcagggtaaacaagttgagcaacccaagcataacaaggggaagaagaagattacaggagaaggcagcagtaagaagagatccagagtagctgaatttgatgagctccgcttccgcactgcagagtgccaagcaaagttcgattcttggtatctacccaagaacattatcaaggaacggaggattatgtgggaggagttcccggaggaccatcccatcaggcaggtcatcgtccgacgccggtggcagagacttgtatcatttccagagcccagcagcagtataatcctcaaggagttcctctccaatgtggatcaggacacggtttacagaaccaaagtctcttgggtgaggggagtccaggtacctttcggagagaagactattgaggcactcttcgacacagactacgacccatacgcctcctgcgacttcatcagattgttctggcacatgcagccagatgcggtcaccaagatgtataatgatgatgttccagatttagccaccaccatcagacgagccatcacatgtttatattcagcctggaagacgaagcctagcatggattatataccggacaagctgaagaagtccgagctggtgggtgatgcggcattttggcatttatttgttaaccacacggtcatgccctccaggaatttgaccgatgtgaatgttgagagagctatcttcctatacattctccgaggtgaaggtaacctcatgatttcttctattttatctgaccggatcctccagatgataacagatgtaggtacacggtcctggctcggccactcttcactgatcttacttctatgtcggcatgcgggggtccatattgatgaggaggaggacatggatgttcccatagcgccactcatgacgatgaagacttataccactgctgtgagcgctgcttcaaacgagcaggtggttagagcttctaagctcacacctgaggccatcgccgccgcctctcctcgagaccttcatgatgacccccagcatgaaccgcaggaccagccagtccctacatcaccagtttctcctccaccacagacttcaccaccacacacttctatgccaccaccagttgtacccacacgcacaccgctttatgaggactcccagagcttcatggatttccagcattatgttaggacccagctccagttccagagtgagcagcttgctctgcagacgaggatgtggggagctgtttgccagcatttgggtatcagcccatcggagtatcagactccagcttctactcagcatccccagccttcaccgatcattcctgcagccacagatcctctcggtttagcctcggatgaggacactgcagtgacacagccattacatgccgagcacacagacacagctgcagaggacagagaccacactgattgagcaggactttattttattttagttgctttcagacttatgtttttgggttattttctttgattctgcatttttacatacattattctgcacatttacattacatttacatttgcacgatttgattttactgcatatatatagtacagtattattatcatctttcttattcatctgttttgacgatcggaaaatgaatgcgattttacgaataatgcttaaaattttccaaagcgctatgaccaagtttgtggttgctggggacaacaacatataaatctgggaatggttacgcattatttcgcaaatcacaatcaaggatcaaaaagaagtctaacagaatttttgaaaagtgtccatataatcagattttttttcaaaaataagcagcacataaaactttttcagattaagaaacaaatgaactcaataatagacggatttctctgaattaagtggatgaaataaagaaacatggactgcatgatgcatgagtagaatttgattgatagtatttggaactcatgttgaatgttggaatgatgccagatgtgccgtcgattgagaacaacttgagtcacagcacttgtaaggaattgtgccaaatgtcggtaaattttcttctgagagactccatgttttatagtattctagaacttgatttgtttctctaagtgcaggagtaacttgaaatgattaaggcatgatttattctgaaaccagggccaaattaaccaacctgaacaatattttcctttgaacctgaaatttgagcctgaaaccttcatttcaaagacccaagattaagccaggaccaaacagttctaaccttttgaggcttaagaaggtgaactaagtccatgtcagaaaagtgctaagaagaagaaaaagaagagaaatcaaaggaatagattgaaaaagttgaaattatcagctggaaaaattcaaaaagctgcaaaaatatgtatattctgattacaaaattgttggataagaaaaatgtgaaaaagtaaaaagaaaatagtattacgtttgatttgaataaaagtaccagttttgaaggaaggaagacaagaatagagaagactacaaagagcttggacttagggaactagattaagtctctgattaagccactttttccaaatttattcccacctctagccaggccacattacaagctttaaaagaccttttgatcaagtcatgattgcatctaatgagaatattttcaagcctatggtaatgctctaatcatgttgagtaagagggtaattataaccttaaacacttgagtgaatgagtgaatatatacacatccgtgaggaaaattcaagtagtttcttaatttgatagcaatgaaagcatcatggaagattgaactgagtgaattatacattcatgatggttttatgattgagaattgtagttttgttgattattgattcatgcttatgtcttagaattctttctattgctgaggacagcaagtttcaaatctgggaattgtttgatgtgttgcaaacacatcttaaatatagcattagtttaagtcatatttagagtaaatagttaggaaatagtatgataattaggcatatttagtatattatgataaataaagcattttaatatcaatcaattgtttacaggacaaaacaggggagattaagagcaattaaaggagaaaacaaggactgcaaccccacgcgtgtcgcgccacttccacgcgatccacttgaagctccagaatgtatcacgcgactcgcgccatgtttcacgcgagtcgcgtgacaactgcaaggaaaagccatttcagctctgtaaagccacgcgacccacttggggactcacgcgagtcgcgtgaatacttcaaggaataagcaattcagctctgccaagtcacgcgagccacttcacatgtcacgcgaatcgcgccattcaatactgccaagtcacgcgtgtcgcgtggtgtcgcgcgcgagtcgcgtgacactgatttcttgcctgaattagagaagatctgttttaaaaataaaccaaggcctaggataagtttctgtaattaaaaacactcgataaataggggtgttttaggagtttttacacacactggtagacaaacaacatcagctaacagcctgggagatagaattagacacttctatagattgatagcaaaccctaggaatcaagattgaagccaattctgcagaatcatgttccatccaattgttttggtgttcttgaggcctatggctagctaaattcctcattgtggaagggccatgaacttatgagcttacatctgtaaattgactggtattaattcatatgttatgtttattttaattcttttctatgcttaatcattatcttgtttagaattgatcactctgaataggtatagagagttataattcacaatggacacgttgggattataatatcagacctgttaagattaacacttgttcttcacctagacatagggatgcatgagtgcggaggtataatatgttctttgatttcttgaattgactagtttcactaagacattaggttatgaaatcagttcaaagggttaattcactaagacattagggattaactaatataggaaagacttattctccgaataaacataacacgaacccataggatttgttctttgacttcttagtttgacagaatcgctagaaggatagggttctcgattgaattaaagggtgtaatcgctggttaacgctcctaagagtctaggattaacgaatttaggaaagacttatcttatgtaaacttaaaggtaaaactatcagtcaattgaaggaagtaacgcttataagggattgtgcctgaccacaatcacttctcatctggtaacctttcagaatttatttactgttttgtttctttacttaattcaacacaattttccaacacaactcttgcgtattttattgttctcgtttaatcacgaattttataattattgagaaaaacttccaatccctgtggatacgatactttacttacccttttattacttgttaaacgatcggtgcacttgccgtttttaaacgcatcagcgtaaatctgacaacagcgagcagaggaacagtgaacgctgagatatgaagaagcttggatgacttgcttgctgtgttttgacttgatgagtggatgatctggtttgatgttgccattttgtgaattctggaagtcgtattgtactgtatttgtattttattttggatgactgtacacggactgctatatttagttatgcttctcattataaataaatcgtggtgaggataatcgtttatgttacttacgaattataaaattagcaagcaaagcgaaacgaattttcgtgaaaagaaaaaaaaaatttatactaatctaattttaatataaagtggacacataattttatctaaaatcaaccgagcacgagagtgtaacgagaggcgttacactctgagcttttccctctgaggttcctcttctcactcaaattggggttttcaaggaattagatgaaggattcaagctttctaatcggttcaatcaagattctaaggctcagggaagtgtttaggctaagaaatcaagtcctaagaagctttaggacttcaacaatggaggttggctaaagggaggaagaagaaatggtttttccttccatttctaacgttttggcctttaaattctaatctgccgacgttcccacgcgactcacttgggatggcagacagaaataccatttctaagccacttcccacgcgactcgcgccattcattcgggccttccacgcgacccgcgtggatcccaagtgactcgcgtggagccccagaaaaaaaaccatgatttctggaccacttgccacgcgactcgcgtggatcttcaagtgactcgtgtgacatggcagagccatctgccccatattacctatatggcgcgggtcgcaccgcaccccaagtgggtcgcgccatatgccagaacaatccacaaacttgcatttttaagcatctttcagaggattctaaagcatgatcatattccttaacccaaaaacttagattcatgcttaaactaagcttaaacatatgcttacgaattcaagttattacatttggcgccatcagcgccaatcctggcgccaccggcgccgcacccttagcagggttaagcgccgaaaataaaagtccttacaagccacagagtagggcccagaccacagagtgatattgttccaggtaagttcagtgttctctggggatgaattcccgttttggttgcacaccacactcctggggagtgttggtcatgattcatactgcatgcattggctatggcattgtttatgttgatttatctgtatttgcattggatatatgcatgttgtgattgagatatctgttggccaatagataagtaccggcattgaggagctccgccgtgtattctgggcgttgaggagctccgcccgtggtattgaggagctctgccacagcatgacaggtactgacgttgaggagctccgtcagggcgttgaggagctccaccaggcattgaggagctctgccacctgtcatgtattgagattatgattgtgattatgattctgatatgatgagggccagagggccaagccagtgggctatgttttctatgttatctgtttgtgtgttgtgaatctgtgggccagggtgggaatgattttcccaaggaccctgagcttactgagatatgttatctcaccccgcgtgggggttttctatgatttcaggtgaccttgttagaagagaagaccagtctcagggcaagaggcccagcagagactaggctgcttgactgaggagcggcatgaagagcttgaaggctctattttgattctgttttgaagtatagttctgtataccctcatggagggttgatattcttttgtatcaccacgggatgtgtggtgtggactctgatgtatatgtctgtacagaactattgtgtgttatgatatgagactttccctgagtatatttgtgtatatttgataaactgcgtgagtcttgtagttatctggctctatgatgtatgtatgagaaactggatcagcaggggcatgttatatgacttgtgtgtgttatctgatgaatttgtcattccatacataatgtatcaagaaaatgattctatgcttccgctgagttacataatttgtgtttttatgcgataatctgatattattaatgataacacgtcggaggcctacggggtgttacagcttgcaccaccaaatctcctcacatcagatctaccagaaggaacaggacgactgccactccgcctcctgatcatgtcctctacttgtctgcactgtctgacaagactccccagatctctcgatccactgccagctatcctctccttaatgtcctctctaagtcccctctggaacttagctgcaagtacgtcagtgtcaggtaactccctcctgaaatgagcatatttggctaactcattaaacttagccaaatactgatcaactgacatctggccctggacaagagtctcaaattccgcctacttctgctctctggcgtctcgcggaaaatatctgtccagaaactgggcctcaaaagcctgccaggtgatagcctctccctggcccctcatcagctctgatgtggtaatccaccactcatgagcgtctccatgaagcatgtaggtggcatatagaagcctgtgatggtctgaacactccatcactgtgaatatcttctctagggcctgcaaccatcgggccgccaccattggatcataatctccatgaaacactggaggatcatgcttacgaaaagctgtaagcatccttcctctagtcacagtctcctcctctaaatatgactgtgaaggtcctcctccgggatggttagctccacccacctggcgactaccctcgccctcaggtacaggatgtggagaaggtgttctatcctccctatgccgagttctcaactcagccatcagctcctcattggccttcatcaaggcctcattcgcctgcctgcttgcagctatctcctgctgcatagcggccaaggcggctaccactgggtcagggtgtccatctgcacccgccacaccatcctggttccgggtcctcaccatggtattgcacatatcacataaaaggatgagttgatcaggctcactctcttacagccacacatgcaattaccataatgaacccccagaacatcacacaaaacacacaattcaccatatgtacaatgcttccctaccaaaactgctctgataccataatgtaacgccccatcaatcatcagggtcattaccaaacataaacatcaatcacacagaaaattatcagagtttaagcagtttggaagcataaacaaagagtgacgtcatcaaaggtcactatcataaacattgtacatataatatggtgaatatacatataatctatgtttaagtacaaaactgtacaaatacattccctcagggtacaacaaaactaaaccaaaggcagaatacaaaatattagagccacatgctcaagtcatctatgcctaaggtttcaaaacaccgctatccctgcacaggcttcttgccttgggatctatcagctcctcctgaggattcacctgcaaaacatatgccccacacaaggggtgagatataaaatcccagtaaactcaggacccttgaaggtatttccttcccctggttcactttcatacacatatacatgaaaatagtatatcatcatcagtgaaatcattaaatcaatcatcatcaatacaggttcacctgacgacaatcagtgaatcactcaaccaatcctcatgcacaatcaatgcacatctacctgactacaatcaggctagactcatggcatacagccattcatcatatccaacactatcccgctgaggctacatctatgtatataggaacatctccaaccaggaggctacatctatatactaggaaacatctcatagcaggatctcaatgcatctatcagaggctacatccgtatatataggaacatctccacctggaggctacatctatataacgggaacatctctttataaggaggctacatctgctgatataggaacatctccaccaggaggctacatctatatcgcaggaacatctcctaacctatctcaatacaattgcctgaggaggctacgtctgtagatataggaacatctccattcgggaggctacgtctatatcacaggaacatctcacatcaggtcttactcaatcacatgtcatctatcctactaccgtaggatacaacaatcaaccatgcaggtcataagctaggcaaaccatagccatacatatcaaccacccaatctcaaggcgtagctcacagaacaagcatcacctatcaatgtacatcaaattccctttcacagggtacaacataacattcagcaatcaatcaaacaatacacaattttcacatatatatgtataacattacacagaaccatcatcctaacatgataataatggaacacaacaaaggatgcacaaacaagaaccaagagcttaccggctctaggcaaaataccggctctcccggcctcgtggtcaccaccactagaactatcaagctcacgtcctacagaaaccaaatacacattgtatcagtaacggtcctaagccgttagatcgaaaggaaactacaattccttccacataacccataacaatcacttcacaagtgattctcagaccctcagaaggatcctactcagcctgcacaaggctccagagcctcttctaagactctgatcatagcatatccctgcttatacagatcaattcgaaacttctcattatcaccaattccagcttacaaacaacatctatactatctcatgagcaactttgtcaactactctaaggttcatactagccaaaaaatcagtcatttacctctgttcatacaaacacagagccaaaatcaaacttcatcaataatgatgatttaaggctctaacttcatcagaataaccctctgaacacaaaaatctacagagatcaagcctaataacggctttaacacctccaaaaacacctcttaaggtattcaaaaccaaccaaaacccaaacacagaaccaacggctaaggctcgagtttcttacctctgtgtagtccagacacaccagggaatcactttccttaaggtagatcgctcaatcaaagcctccttcgcctctgattcttcgattccaaggactcccttagaaattgcgatctcgccgtttaccgcctcttgtcgagaataaagccgggtcactagcttatctcgaggctctaaacactttctcagttgggtcagaggtgtttagatgagaaatggagaagatatgaagctccacaagtcatcaatggccgtttctctctctctcttcctttctttctctcagcccaaatgagctatttataaggctgaaacgaaggtcccgcgcggctcgcgccacttcccgcgcggatcgcgccaaaggctcgaataacccgcgctgtccacgccatacccacgcggatcgcgtgaactggccgcaaggattggcctgattcaagcttcccgcgctgatcgcgccctattccgcgctggtcgcgccacaggttcgaacaattcacgttgttagcgccacagccacgtggttagcgtgagatggccgccaacattggcctgattcacccatttcacgcggatcgcgccgtgccccacgctaaccgcgccacaagctcgaatcagccacgctagtagcgccatgtccacgctaatcgcgccatctgttcaaatctgttttctacttctcttaagcttccttgagaatttctaatgcatgattatggtttcttaatctcaggcttaatcctatgctcaaaattcaatgtattacatgccaagcatgcgaaggaagtggaatccataagattttatcaagggaattgaacatgaatgttagtgagtttgcgactcaataggagtacgtgtctcaatttattcacatgcaagtgatcgctgaagatcgaagatacaagaaatttgatcgaaacaaaaattgaaaaggattaccattcctctaagtattagagaatttcctactccagtggagaaatccaagactgaaaagtttagggattatagattacctttgtaccaaagaaaaattaaaagtctttcatttatatatagaagacttttcaaaccaaagcatttattagttttcagtttgaacatggaaatatgtctaaattttatgacttgcatgatttatggatacaattaattaaaatttatgataccttataataataataataataataataataataataataataataaaatgatgaaagttctagcggagaccaatttaacattatttttaagtttttaatttatttcatatattaatattcgactcattaaatttagcacgattaagaaatttaattgaaacggtgcaatatctcatcacaatagcatctcaacaccttttattttgttcttatggatttcttcaacacttatgtagtttcttcagtagcaatgacccttttaacataagcatcaagcactgacccatcataagggccgtgcttgttcttgttttgcctcttgtcattcttgcgccgcttgctgccattccagcggttcttgatggtgtttggagccctaccaggcaacatcttagcaatctccgaccacttgttacctactttgttgtgggtttcgatgaaaattttatcttcgtttagggtccatgagtccttctaatgaattagttaatacacgaaaaatgtgtggttatatacttgaaattacatggaggacaaatatatatattgaatcaaaattggagaaccatactttgttgttacctctaaactaatggatatgataattcacaaagttatgagagatgtgatcaatttgactttgcttgaatgcaagggctaacagatgatgaaatatataatggaattacgttacatatgaatataagttatattgaaatataatcttaaatgagaaattaatgagggttaactatcaaacattgtacaaaaacaaacaaaagctaactgaacttgcaaactcaaatattttgattaataggatgtgtccgaaaatgaatggaacatttaaataacctttttacataaaatatcataaagaattcataaaaacttataaaataattttacattaaatacttgacttttttttactgaagtatatgatatatatatatatatatatatatatatatatatatcaagctaaaaaacatcatatcacaaaagaattaaaatcttatataaaaataatatttaattatatcaaattttgttatatgtacttttttttaatctttgaaaccaattactattaagtaattgcttgtttatctttaattcattacataaatatatgtgctatttgtttatataagtttaaactttaattccttatatgattgacgcaaaaagattgtgagtatgtttgtctataaaataagaatggaaaggagagaaaccctaatgtttggttggagatggttgttccatcgttcctgacactgcttcccggtcctacggtgcagtaactttgcaatttgtgaccatttcttcaacccatatcgatttactaattctttaagatcactgcaaaacccataacttataccaatcaaatatttaggtttttaagccttaatatatcttacaatgaaatgaatccaaggaaatattttcaataattaaaatctatacgaatcacataaaagttaattaaacaaatgaattggtttttatttatttattattaaaaacactacaataaaaattaaaattagtgaaaaatattatatataaattttttaaaagatctactacaatttttataatcctaaatttggtcattaattaattaatttttcataatgaaaaaatagaaaaaaaagcagagtaaattttttcgtgcataaataaataccacatatataagtatatacctgtcttctttcgtactccactgccctttgattacattatgattaccaatgttggaatccttttccatctttaccttctgatcggtgtcccaatgatattgactcatacaccatccattagggagagaaaagggtgatggcgacttggaagaagaagcttcagttggacgaggcatggttttctgtgaaaaatccgatatggctttgcctttgtgctggccatacaaggcctccattttgttgttgttgtttggtgccaacgtcataggggggtgacgctgaacattaacaaagcctcccagggaagacccatcacccaaagaaggggtcgttatcccatacatgggggtggtgatggggttggaaggaccttccatcacaaagggagtgttgtgggtaggcacattcatgatgtggtcttgaaaatggtgggaattgttgtgagggtgaaacatgacggatgatggtggagctggagcgaaaatggagctttgtgatggaaacatggtttgagtcagtggcttcaagtaggagtttccagggaaaagacttgaaaggtattgtggcccttggaaacttggatcaaactccatgcagaaaagctcacaacaattgagcgaggaaaaagagagagtgaaagagagaaattgtatcagatgtgggggaataaggggttcttatagtcataagttgtagtggacccaaaaatgcaagaaggagtaagggttaatgtgtaaaattagcccttgatccataagttttttacgactcaaattcatagtcagcgtgactgttgaggttctactttttactaccgtcagtaagaaaatcaggttttgtttaccattttaattatttttattttttaagcgtaatgaacgattccccacttattttaaaaacattattacttggaagacaacaatagtttgaattaatttttatgtgacacatctaagttttattaattcttttttgtaaattaaaatttttagttgaaaagtatcataaaaattgattgagacaatatggacacatagtagtctaggattatggaatatctatttctcatcagcattatgtaataattgcttattaacattcattttttctctatttttattattattaaaaatatattatctattatatttacgtttttctctcttatctctctttctcattctatgtgtcaaatagacttgagtgtctacaaataattttctttcgctaatcttaccctactctttctgcagtaaaatttatagaaagtaaaagagaggagttatggagaaatcattacaaagtatagtattttaaggaaggtttttggacaagtagaagacatgttatagaataattaaaaacattaagataataatgctcttatgattaggataattttaatcaaaatcacaattcacaattggtaattgaggtttgaagagtgaaaattattagagaatggaaaatatataaaaaatggcctaatttctgtactagagaatggaaattgaggtttgaagagtgaaaattattaaagtgattttttttcttattattaggtaaaatttataataattttactaaattttggatactgaaatttagtgaataggaatgataggcctactttgtttgataagacgaacatagttattatctaataataaaaatgcgttaaaaattataatatttaaagtaatattagcgtagcaataatattttcatatacttttgccgttaagttaagtcactattataaggaaccatatgaaatatagttttattttctattcaagtgaatctattttaaagcctaggttcattaactttattaagagaaacacaacaacgatattatatgaattttttttcttattgtgaccaaattaaagttatttgtttaatttccacccaatattcttatatataggagtattaatatatttttcttcttcaaaattttaagtttcatagacgttttatgagagtaattattagtcacggaacaaatgatcatttaaagagtaattttaatcaagagtttgagtttgaatctctatacaagaaagagttttgttaatagtggtcgtattagacttgaatcaaattaatttgatgtgcaatataatgtctagttttgctttcgatccttcaaatcgaggaaaaaagcatatcactttctatggaaagtttcaaagactgttctgataaaaaaaagaagttcaaagtctgtttaagaaagaaccaaatcgtatatggtaagagagatacaaagtttcgtcatggttttcaatacagtgtaactaaccaggtatataccaacaaaaggaccttgaatgacatcatagtcaatttcaggttttatgttttaaataagagggaaaataaatcaattttgagtcgagtatgtgaccatatcttttaattttttagcccgtaaaggacccttcaaaaaaattcatcattccttaacctatttaatgcttccctttacatttaatagacatttattgtgaagtctttatatatatatatatatatatatatatatatatatattaaagttaagtaataaaataaatgtgaaataattgttaaaattttaaaagtgaagatgcatttaatataataataaataatatatgtactaatttttaaaaaatcatttaatcataaataattatatgataattttattgactttaaaaataattgtcttaaaatcaaaactaaatttttatgaattgacgtatagaagttttaaccaaattatagttgtcatcctttatcttattttttttagattcattttgttgattattttttaaaagattcatttttgtcttttaaattttaaatttgagtcattttagtccttttgtgtttatcaattgctgcaaaattataaaatactaacaatattattttcaagttgacaaaaaaggaccaaaatgactctaatttttaaaagttaaaggaccaaaatgaaattagaaggcttttgtaaagttttattccattatgatatataaaaaatctcttccacaatttttttttatttatttggtaatatatttaataaaatagaaatttaaaaaattgtatatatctatttcttatggtagttttaaagtaagcattgttctaaaatgaatatattttaagataaacaaatttgtactttaaattttaatatcttaagattatgatgcactagaaatcaaataaaaaaacaaatatttttcactttttattttgataaagaactcatgagttttattatttaactcaataaagatgtagttcttaaaacaaaggcttaaaaggccagaatatgttaacaaaataaaaaaatgtattacagattaatcaatatgtaattatattttggtggtacaacgcgacaatgagtttggagctgtgtgcatgtttgtggcttagaacgatgcgtgtggtagtggaggggatggataacggcgtggtgttgtggtggtggtgtttaggtacgacgttggtgtagggtggaggtggagtctcgtggtcatgtaggtttcagagagaggtgggtagaagcaaataacacaacaaggggattgaattgtgtttttatatatttaaaatttttctaagattgaaaatatgtttatcatctaatgcagataaacctaaaaccacttagaaaggttttgattcagactttgtcaaatgatgagaaaaataattttctttgtaaaacaaaaggagatataagatctaaaaataaattcaaaaccctttgtcagttcaaacaatataaataagcacacaaagaattatacttgttcgtcttaaacctaagtgtccagttcttggcaatcaccaagttttcactaacttatcaaagttacaagtattgttcactgccacttctgacttctacacttgcaagctctatcccaagcttgacttaaaaccaatattctttgtcctaccaagctactgttagctctaaacaaatcaacaagatttgttagaagattgcacactgactaaatatgttatcatctcatagatgaatatataactcaacacttttagtctcttctctcaaggtatataaagtgttttgagagcttagtatctttacaagaatttatagaaagttttacatgaaagaataaaagaaaaatatcacgtagttgattcgtgtcttgcttcttcaaagcttcgtcaatatataaccttcatctccatgtatccgttgtctcacaattggattctacacctggtcttcctctaaagtcccgagtctattggagtgcaagtcccttttttcatccaaagtccatgctgataggttagtgtaccttgtgttggattcagggggagctacttaaaagaatgcaaggaatcaagcattggttttgagctttcaacatgcaatggataccttgaagattaattagtgtgaaatgtgtaagagaaaagtaattctggtgatccaagtacattgcattcatatccttctataattcaattaatttgattaataaaaatcacaaggctttagtaaaatgactaagtttttgatttgattctaatgtttttggaaaaatggtttttgtactaatttaatcgattaccttaaaggtataatcgattattttgttcttagactattctcgaacagctttcaagaacaatgtaatcgattacctatcggaataatcgattatttgacctttgttttatataaactgcctagttgaacattataatcgattattaatgggtattaatcgattacaaagctttatatgattttaagtcttgctggaagaatcgattaccaaggtattgtaatcgattacacaggcttaattggaaaagccatcttcctgctttaatcaattaccatttttagtaatcgattacactatgtgttgaaaaccataagtttgtattagttaatcgattaccacatttcgtaatcgattacatagtgtattttagaatgctacaagctcctgtcttaatcgattacatagtacattttgatattttgaagcttcctatcttaatcgattacaggacgaaataatcgattatttggctcgttgagaaaatcctgaattacttatgaacggtttaatcgattactatcttgatttaatcgattacatgagtaaagtaatcaattatatggagcatttaatcaattactgacagttacaaaagtttgttataaatagaaccaaggctcaactgcttttctaactttgtggaacattacccattcattttttttagcttaaacagtcttgtgagcattcttaagtgttttctaagtgttcaattgtttcttgctcctttgtgccttaaatcatgaatatgtgattcaatattggagcttgaaaccatttcaagattaaggaaagttgtgctatttgattttcattcattcaacctgatatggtaatatcatattgcattgcatcattagatcatcaggttgtttctctccttaatctggttgtgatttttgttttgtattttctttgtgatttgactattgtaattgggttcttgcttggaactagagaaggggttctctaggtgaaagaactgagtagtgttctcaggttcttgtctcttagaatctaatagggttttagatttttgttctttatctagggttgataaagggagactttgtaattgcttgtaagaattgaaaattataatagtggaaccttaacctggtgttggttggaagaaaactggatgtagcttctagtgttgaagtgaaccagtataaatttgtttgtgttttgattttctattccttaactgtaacaccccgtaggcctccgacatgttatcattaataatatcagattatcatagcaatataaaataaactttcagcggaagcacagaatcgcatttcttgatacattatgtatggaatcataattatgtcgagaaataaatatacaaaaccataaatcacgctcctgctgatccagttatccaatcaaacataattaagacagataacaaaattcttaggcagagtagcaatatacaacacatatacttaggggaaagtatcatatacatatcatcaaaggtctgtacaatatatacatctcagtttcacaccacaccatggtgctacaaaataatatcaaccctcagtagaggtgtacagaactatacatcaaacacaaaataaactatggagccttcatgctctctatgctgctcctcagccaaagcagtctagtctctgatgggcctcttgccctgagactgctcttctcttctagagggttcacctgaaaccacataaaccccacacggggtgagatagcatatctcagtaagctcaggatccatggaggaatatcctccatcctggcccactatcataatacacacaaacaagtatcacagtcaaatggctcactggcctagccctctggctttcacaacaacacaacatatcatacaaacgtggctaaacatttcagagtaggaggaatagccatctcctataataatgccacgtaataggaggaatagccgtctcctatatcaatatctcagagtaggaggaattatcgtctcctagaatggggaggaatagccgtctcccagtgtgaggccggaactcacacctgtgtcatcccattgggagctacccctttgcatggatgcacaatatatggtacctccgagaatagaaggaatagccgtctcctattcccttggcctaggggatcatcatcaccccgggatcatcatcacccaagagccagccatactaggaggaatcgccatctcctaggaaggtccatatctatctattggccaatagatctatctcaagcacaatcatatcacagcacagcacaattcaagctcagaggcatatatacatcatcacaagaatgcagatatctatgcatgcattatgaaatgaccacaactccccctggagtgtggtgtggcacacaagatgggaatcatccccagggacactgaacttacctggaacaatatcactctgtggtctggtccctgctctgtggctcccgccaccaataatctcagaatcaacgcctattcaaggcacatacagtttcatatcaatatcaagaccacagacctcaatcacagatcaaacatatcagaattcccctatcctagggttcaaatcaagtctagcccatcattaggcttctctcagaccacacaaggtccccatgactgcctatcaatcaattgagtcctcacagactcaatgcaatctcatgctcaactatcattggtatggcctcagtctcaaccaaggccccactccattagcctattaggcttatacaacctatacaaggctctggcatatcagatgacaagcataagtgaccattacacaggccacacaggtaacacagagccaaaactcaaagtcatcagaatcaaaaattgaaagataatccttcatctattcaatgctcagaacgagtttctctacaggaccctgggctaattctagccccagctcagtgtgggtcacaaaactcaaaaaaccccagattcacagagaaccaagagaacttgaattccttacctcagtggcgactaaggagacctcaggacggcttcctcgagctctggtgcctgtcagccttgggtctcgactactctcaagttctcagaggtttctcacttgagaattcaaactctcactcaaaatggatgattgaagaaaagatgaaagatttcagctttctaatcggttcaaacaagattataggtctcaggaagaggtttaggacacaaaacaaggtcctagaaagcttggaacaagctctaatggaggctgggtcgtggagaagaagagggaatagtgtttttccttccaaaacgcgattgccctttaaatagtcagcctgcccgaggtccgacacgatccgcgccacctctggcgcgatccgcgccacaatggcggtgatccggcgctaacagtgccaacccgcgccatcagcgccaacttctcaagacctgtggcgccaaccgcgccacctctggcaccatccgtgtgaaaatccagagaaaactgatttcccagggcactactggcgctatcagcgtgaaccgtgacgctaccagcgtcaactccaaaaaccaatggagctaccagcgccaaccgtggcgctggccgcgtgggaatccagagaaaacctctggcgcccctagcgccacattgacgctcccagcgttagcttccagtgggtctggcgcgatcagcaccagccctggtgccaagaatgagggtccttacattaactctttatattcttctgttcttgattattttgtttgatcaactaaatcagttttgattcattgaattccttggggatgagctacttgattgaataaggtttcttggttttgaaaagtgataaagatcctaggcaactctgattttgaataaagaaatttttaatttaccaaggcttaaccaattcacccccgcctcttggttaagtgtgagatattcatattctttacaccttgtactccaacaaggaagtcatttctttcatcatagcaggtctacaacaacagagggtggcttttgatgaggatcaacgtcttccagactgtggtcttcatttattcttcataggactttaacagatcctaggagaattttttgtgcatgaaagaatcttagacacaaagtactaaatagaggtcttaatgctataccagatcatcttatgaatgcgtcgtttgaaacatcagacgcacaaatacaaatcatgatctaatagcatattagacataacttttatcatttgtatttatttgcatataatcaaaataattaggactcctaattcttctttaagatataaatgtcttttgatttaacaatctccccctttttgatgatgtcaaacaaacatagatgtaaaagttgaaaacgtgtatatgatatctataatgacagtttaagtgcaacatcagtcttattagatgcaatataagaaaatatataaaaaaatgtgtcataagactttgagataaattcctttagtaagaaaaatcattttattctttagaagcatattacatgaagaatagatgaataagaaaagaataagagtctaaagattttagaaaatctccccctcacatgatgcgctccctcttagtttctttttacttcttctccccatttgtttggcagcttcttcttcctcttaaagcttgcaaaagaactcatcccagattcatgattagatgaactatccattgaggcttcaacaaatctcttaaagaagaactccctaaggaccttccatcttttggcttctctttcaacatgagccttatcatgaagagcttcagtaaacacctccttggttcttagtagtgttttctcaaggaaatgtacattcaataatgggtttcaaggccattagaggctttcaaggccatatcttcagcagcaacaacaggtgcctcatcattagaattcaaatcttcaataatgggttggacttgatgaatgaaggtgaatgtggagtttggaagctcaatcgtgaatgagaaattgcgcccagacatagtagcaaagtcactcttccattgacaaacttagttggatggtgaatcaaccataaagggattgtgattgatagttctatagcaacaaccttccttgtgatgaaccccatctaatggtggtttttcttcaagttccaaaccatagttgtgagctcctagtctgtaatacctttgtagagctttctaaacccttcttatgagttccctcttttaatgtagtgcaactacttcatgtttgaagagtcttcctagtgttgctttcacatagcgcgtgtgttggatcagccaagaatctagaaaggggggttgaataaattctttcaaaatctttactaactcattctttaatcagattaaaacaacccctttcaattgattaaagtttcctcaaaagatcatatcaaaaagatcattacaaaccaaaaaatatatatgattataacatttgttaaaacaattttttttacggccgtttgagatcaattccaacaccaagatgaattcaagactaagagttaaaagaataagagaatcacacaagagtttatactggtttagtccaatccgaacctacatctagttgttctaagtcctttcccttttcttttgtcagaaaatcacacaagagtttatattgattcatccctttgcttaaaagaaccaatcctttcggttttcaacatgatcaacaataatgttgacccaatttatctttagcttcccttgcataagattgataaggaaaagatcctcctcagtcaactgaacgtgattgctccccctaggagtagtaatccaagcaaccattgagccaagaccctttgctcaagcatcaatggtctagtaccacaacactcctttgcctttgcttttgtaacaacaacaacataggtagaagggttcttcatcatagacttataccaattccagcttccttgagaccagctggttagccatagatcctttagaagataacccaacaatctctaaccatacctctgacgtcatcacaatctgttgaaaaacaaaaggaatacaccaagagagggggtgaattggtttaaacttgatcttttaaaatttatttataaaatcagagtcaaaggatcttaatcacttttaaaccaagaatgcttttaatcaatcaaatcattcatctcaagaaactaataactcaaaacaaaacttgttgagtaatgataataacaccaagaacaaatgaacaagatgacttgtagaaatagagataaagaaaatcaacacaagcaattttatactggttcacttctcaagagaagttacatctagtttcttctaatcaacactagattagagttctactattataaatttcagttcttacaagctttacaacaaactctctttatcaacactagttaaagagtagaaatctaaaaccctattaaacttctaatgaacaagaactagagagcactactctgttcttacctagagaacattactctaacccaagcttcaagaacccttttacaatagcatcaaataacagaaattgcaagagcagaattacaattaaagattatggagagaaacaacctgatgatccaatgaatattaatccatatgaattaccaatcaaggttaattgtagaaacataatttcagaacatgctctccattacacgtttgaaatctcttgcccaagaaatcattcaatacccatgaagattaaagagtgggacaagaagttagtaaacccagaaaatcactttctattcgaagtgttcaagttacaatccaagccaagccttctttctatttataacagcttttgtaacaacctgtaatcgattacacgcgccaaataatcgattaaaatagcttatgtaatcaattaaattgtcacataatcaattaaagtgttcaaggaacattctgggtttcgaaatgaacaaaataatcgattaatccgagccgtaatcgattaaaacaaaaaagtttgatttcataaatagcttgtgtaatcgattatattttatggtaatcgattaaagcagtgaagcaagtttttttcaaatagcttatgtaattgattacgaataatggtaatcgattattatagcaatgcacaaaatcctttttacactatgtaatcgattacaagagttgtgtaatcaattaaagtgttcaccaaagcttttccagtttcaaatacgaaccaaataatcgattaatacactgagtaatcgattaaaacagtgaaattacatttttccaaaaacgttactcaattaattcccttttcaaagtgtgagtagcttttgatattttaatgaaaacatttaagcatgttaatgattatatgcatgcaatgcaaggatcaaaagattggcctctcctatacttcacttgaaatataatcttcaaggcatgtaaaaagctaaaaccgttcttccaattcataggcttcattcttcttgttgctccccttatatccaacaatctccctctttttggctttgaacatggcaaatatttgattgaccaagtatttgatttttgaagaactttgaaggatgaaaatagaagtcttgaactttgttaacctgaaaatacatcatcctctttgccaagaacaagtgttaagagatatgcttgcataatcattaatattaactttcattagttgcttccttagacttaattttctccccttgacttagataatttttgtcatttaataatttgtaaaaatccaacaaaaatagagtagaacagagagcaaaaatagtttctctttagttagttatcaatcaatttttctcccgctatttggcttatcaaagacaaaaaaatagcacaacaaccatgagaaggagaaatgcaactttcattaatggaaaagaaacagtacattaaacaaaaaagagaaaaagaaaacagaggaaaacaagaagaggaaatacaagaaacccaaagtaattagaaagaaaacatagcaatcctaaaagaattcagaaccattaaggacaagcttaaactctatgttttctagcctagattttatctcctccaaagctgaattagtctcagccctgtgctcatgacgtagggacaataagccatccatcttttgaatcataagtgattcaaatggactgtaagattgttgagcagggccttcatcttcagcctcttcatcaacttcttcttcatttctagcagcaaggatgtaaggaccctcattggtggcgcctaaccccgcgcgacagcgcggggattcgaattatggcactatgtaggagggtcggcgcgggtcgcgccacaggcggcgcgtatcgcgtgagaagtggcttggaaaccagattcttctctggtattccacgtgggtcgcgtgagagtatggcgcgagtcgcgccagagtctcggcaggttcacgcgagtcgcgtgaatgtccacgtacatcgcgtggaaggccagaacgtatggcgcgagtcacggggtaaacggcgcgagtcgcgtggattggtggcgcgacgtgcgtggaaacgggcgcgagacgcacgggaatgtcggtactgcgtttatttaaaggaagctcgcaattttctgagaaaaaactctgttttctctttccctagagctgttccaccattgttaagggaacccaagcttccataggccttagtacttcaccaaatcacttcctaagcctgatatcatgagagaaatcatgagtgagctagattccttcatccctgaacccttgagtttgtgagctgagagattcctttctcagaggagcagaagaggtcgagataggcaaggattggtggtgattttcggacaccagaggtagaggtagcggtccagaaatcatccttgctgtttctgaggtaagaatctcatgttttaccgattgattttcgaattgggggtgctctgtgaatagtgacccttttgagatgggactagaattagctcagggttctgtagagaagttggtttagaactgtatagggatgaaggattagctttcagaattagatttggtgaactttggttataggccctgtgcttgatgggtgacttgtgtgaagtcaccagttgctgggctttgagatgaaagagccttgttatatgtgttgtgacgcctgtgaggctgaggaacggtgactgatggctagtatagaccgttctagttataactgtattatagatgcctgagctattgttagttctaagctcaatttgtgagtgcatggtttggagttttgggatgactctaaggttggtatgagctttgagctcattgcttaattgtgatggtgagtccagctagactcatatgctcttagagagctgaggttagttggagctgtttgattatggctgatggagagtctatgaggactctagagttgtaagtacctctgggttagaccgtgtggggtctgtggaagcctagattgtgctgggctagtatggtgaacctcaggatagaggacttatgtgtgttgaaatgcctgtataattgtatgaattatgatgtgtgtatgcatgcattggttaggtctggacaccgagggtgtctgtggtgggtatcaccagtcagggagaggactgcagagctaggctttgccaggtaagttccgagtccctgtgattgatctcgtaactgtgtgccataccacactccatgggagtgttggtcatatccataatgcatgcatatgattgttgcatctgctgatgatatgattgagatgcttgtgttgattgtgatattgattgtgcttgagagatctattggccaatagatagatatggacctccctaggagatggctcctagtatggctggctcatgggtgatgatgatcccggggtgatgatgatcccctaggccaagggaatagttcagatggtttcctgctattctcggaggtaccatatgtgtacatccccgttaaggttagcaaccggtgggatggcacgggtgtgagttaccggtctcacacagagattgatgctgatgattaggcatctggacgttgatgatgatacgccttgtgtggagcatttgatgtgctcagcgtgtgatataggcctgtgtgcctggccggtgggccgtgtatgctattgtatgataactttggactggcgggggatgtgcttcgccagacctatagagcaagtagtcttgctcatactatgataaggccagtgggccaaatgcatatgtatgctctgtgtatgtgttttggattgttggccagagtgtgggggatttctcccaggcctctgaacttactgagatatatgtatctcaccccgtgtggggatttatatcttttcaggtagctcttctgcaggaagagatcagtcctaggactggaggctcgaccagatgatataggaccagggagggagctaggtagctcattttggagatgatactggtatataccccgcagagggttgtggtccataggagctttatttttgtatctgtacagttttgtaccctcatgtgtagagggaaggacttctctgatagaacccctggtgtggttcaaagcatgtacatggactgtttattatatgtgtataagtcatctttttctcctgactctgttatttgtttatcattacctgcctattctcagtgatgttgttatatcataaactgaatcaacaggggcatgtgaaatatggaattattgtatgtgggatataatgtgtcatgtttggtctgcttgattttattgtctatacataatgtatcaagagagccgatccaaaccgcttccgcatgtttttactgatgttttataagttaatctgatactaattaatgataacacatcgggtgcacacggggtgttacaagggatttgttggccagccattttccatccatcaggcgttttgaccatcccaagcttggtgagatgtttatctttgatgaggctattgcttgagtttgtgttgtcaacaacctcattagagacatctatatcaaagtaataaataaacctggaaacaagaacaacacatggaaaagggtaattcattaacctcttggatataagcataatttcctcaagaataagaatccaattcatctgaatggaattcttgaagccatacacaagttgtaggtcatcatcagtggcttgggcatgattggtggctctaggggttaggatgtaggtgattatttagtgaaaaagtttgtcttcatgagtcattgggccagtgcttagcctaagcttcagcctcatttggaaatcaagaagcatccccctataggtttcccccttattataacccctagcctctttcgcaaatttcctttcaccttcaaaggaaattccagcaacagcttcccagacttcaggagtaatttccatggctactccattaacttgggacagaagggtcccatccataaagcctttatcacaggtgtagaacacctttactaattcagggtaaaaggcacctttcatctcaacaaactttctcaatccctgagtttcgataaaagtagggaattgaaaaccttctctaatgaactaatcaagttcaaggtgtttgggaggacagactaatttggtggcattgaactgaagataggtcattttgtctctcttagcaggaaaccaatggtctaacctattaatagcagagttagagctttcagaaacctttcccttggaagttttgactctcttagatgtggacatggctaatggatgatgagagactatgtagacagagtttctaaagttagagggaagaagaacacaatagtgcttaagaaagaagatgaagatggtgtgatttcttccttcaacagctaaaactatcctaaaactaagatgtgtttgcaacacatcaaacaattcccaggtttaatagttgttgtcctcagcaacagacaaaactctaagataaaatgatcaataatcaaactgaaccacaattttacaatcctagaattataatgttgagtataatcaattcacatcaaagcttccatggtactttcaaatctgtcaattagtgagagtaacttgagtgttcctcacaaacttgtgtttattcactcattcactcaagtgtatcaggctatgattaccctcttactcaacataatcacagtactaccataagcttgaaaatattctcaacagatgcaagcataacttgatcaaaaggtctttcaggcttgtaacttggctgggctaaggtaggaaattcattggatagtagataatatgaggctagacccagttccttaagtcccaatcctgtggtcttccatgttccttattcattcttttcaaaatctggtactttattcaacaattattctctgtggtaaataaaacaaaacaaacaaataactttctttttgattttcttttcttttctttcttttcattttctttttctgcttaaattttaaacgatttacagcaactttcagattttccatctgataatctcaggcttattattctccaactggcttttgcttgtttattcttgttcttctataccaattgaattcaagttgttttccttcatgccttgatggacacttccctgtgtttctgctgtcatggacttgtattgtactttctctagcctcagaaaaaggttggttaatggatatggctctgatttgggtaacagaaatgaaaggttaaagctcaaaaagaggtacaaatggaaaaataattgaaggtaagtcaatttggctcgggttttcggaagaagaaattgccttaatcatgtcaagtcacacttgcatccagagaaacaattcaagttctagaatactatgtgtaacaccccgtaggcctccgacgtgttatcattaataatattagtttagcgcttaaaacatgatttcaaatctcagcggaagcacaaaatcgcttttcttgattcattatgtatggaataaaacatatcacataacacacatacacaagacaattaaacacacccctgctgatccagttactcataacatacaccataaagacagataactaaaaggcttaggcagattatgaattatacaatatttatactcaggaggaaagtctcatatacatatcataaatagttctgtacaaacatatacatcacagttcacaccacatcatggtgatacaaaagaatatctgccctcacagagggtatacagaactatacatgtatcaagtgtacacacacaccatcccttatcaagggtacaaaatataatcaaaacaaatatgagccttcaagctccatctactgcttctcagtcaagcagcccatgtctttactggggcctcctgccctgagactactctcttcctccagaagagtcacctgaaatcataattccccacacggggtgagataacacatctcagtaagctcagggtccatggaggaatctcctccaccctggcccacttccataacacatacatcagatagcataagcaattggcccactggcctagccctctagccctcataacaatataagcatatcatacaaaaatggcggagctgcctcaacgcctggcggagctacctcaatgcctatatcagtgtgagaccggcactcacacctgtgccatcccattaggtgctaacccttcgcatggatgcacaatatatggtacctccgaaaatagaaggagctacctcaacttctattcccctggcctgtgggaaccaatcccctgggagctacctcaaccatgagccagccatgctaggaggaaaccaccatctcctagggaggtccatatctatctattggccaacagatctatcacagtcatatcacatcacaaatcaaacacagatgcatacatatatcattatgaggatgcaactaccaatgcatgcatcatgaaatgaccaccaccccctcggagtgtggtgtggcacacaagatgggaaatcattcccaggaatactgaccttacctggcaaggtctcagtctgtggtactgtccctgctctgtggctcctgccaccaatagtctcaaaatcaagccctaatcaaggcatatgcagtctcatatcaaaatcaatccaatagacatttaatcagaacataccatagcagaattcccctatcctagggttcaatcaaatcaagccatcactatgcttctctcagaccatacaaggtccaccatggctgcatacaaagcatctgagtcatcacagactcaatgcagctcacctaacagagcataatctcatagcagtctcatggtttaaaatcactggaacgacctaaaacttaaccaaggcaccattccactagcctctcaggctcaacacaagcataatcaaggctctggcatggctccaaaaccacaagtgacttatcacacaagccacacatacaagccacagagccaagattcaaagttctctaaatctgaaactgaaagctaatccttcatcactaaaccattctaaacaagtttctctacaggaccctgggctaattctagccccagctcaagtgggtcactattcatagaaacccccaggatcaaaagtaaacggagaaacttgagtctcttacctcagtggcgactagaaagacttcaggacagcttcctcaagctctgttgttcttcccaagccatgggtcctcgccagtctcaagttctctgagcttttccttgagaatccaattctcactctcaatgggtttttaagaaaaatgatgaaggattcaagctctcaaagggtttctctcacaatcacaagtcattgggaggtgttttagccaagccaaaaggtcctagaaagcttgggatactctgtaatggaggctggggtcgtggggaagaagaagcacagatttccccttcatttttgagtttttggccttatatagtggccctgcccgagctttggcacgatctgcgccaactcccacgctacccgcgccgcaatggcggtgggtctggcgctcccagcgccactctcgcgcctccagcgccagcttccagaacctgtgacgctatccgcgccaaccttggcactggccgcgtggaaaaccagagaaaatgagttttctaggccacttcccgcgcaaatcgcgctgcccctgcctcgactcgcgctggctggaaaacctctggcgcccttggcgccacattgacgcccctggcgtcagcttccagagagcctggcgccacattctagtgggtctggcgcgatcagcgccatctgcgccacacccttaacagggttttctgccaaataaacctggaacaaaagtgagggtccttacattcaaccctcctttttaagaattttgtccgcaaaattcagaaacatacctgttagccaactctggatacaactgtaacagctcctgctcccgctcccaagttgcttcctcaggtgtcctgccttcccactgtaccttgaggatgggaatggtcttactgcgaatctgcttcttcattctgtccagaatcctcatgggccgtgtaagactcatcagattctctctgatctaaactgtgtcaggctctaccacgtgtgagggatttgccacatatttcctcaactgggacacgtggaacacatcatgaagccctgacaactggggaagcaaggctagcctgtatgccactggtcttatcctctcaaggatctgatatggaccaatgaacctgggactcagcttcctcacacccagtgctcgtcctacgcccgtcactggagataacctcagaaacacatgatcaccctcttcaaactgcaagggtctgtgcttctgatcataatagctcctctgtcgactctgagccttcaccaatttgtctctgatcatcttgatctgctcagaagtctcttgaaccatctcaggtccaaggagctgcttctctcctacctctgtccaacatactggagttctgcaccgtcggccatacaaagcctcacatggtgccatgcccaagctggcatgaaaactgttgttgtatgagaactccaccagaggtagatatctgtcccagctagtaccttgctccaaggcacaagctctcagcatatcctccagagtctggatggtcctctccctctgaccatctatctgaggatgataggctgtgctgagtctcagctgggtcccaaaagcatcctgaagcgcaccccagaacctcgaggtgaacttcggatctcgatcactgatgatgctatcagggactccatgcagtctcacaatctccctgacatataactgggccaatttctttgtggtgtagtcagatttcacaggtaagaaatgagcagattcggtcatcctgtccacaaccatccagatggagtcacatccactctgagtcctcggtagcccaaccacgaaatccacgaaaatgctgtcccatttccactcagggatctctaaaggttgaagtagacccgacggtctctgatgctcaatcttcaccttctgacacactagacacttagccacatactcggctatgtctttcttcatccctggccactagaaactcctcttcaggtcatgatacatcttggtggctcctggatgtatactgaactggcccttatgtgcttcagataggacgacatctctcaactcgcccttaggcaccacaatacgatcttggtacatcaccaagtcgttatcctcccaggaaacatcctgttggccaatcatggccctcacagcctcatcctgctgctgagcttcccggatccttctgatcagctcattatccaccttggtcttgctcaactcaagaccacgcacaccttctgtcatcgtcaggtgcatatctatgaattgctctatcaactggtaatcagagatcatcaaacatgcagcagtcacattcttactactcaaagcatcagcaaccacattggccttgcctggatggtatcttagctcgaaatcataatccttcagggactccatccaacgcctctgtctcatattcaactctttctgatcaaagaggtatctaagactcttgtggtcactgaacactatcaacttggcaccatacaaataatgcctccatatcttcagagcaaacaccacagctaccaactctaagtcatgcgtgggatatgactcttcatgaggtttcagttgcctagaagcataagcaactaccttcttatcctacatcaacacacacccatgtcccctcttggatgcatcacaaaacacctcaaagacttgataatcacattgtcgacacgcaccaaaacaattttactaagctaattctgtagcacagagctaacctaggtcgactcagagacacgatcaatatgattctagcttcaaatcattggtaatgataagggggtttttgtcaaacagttggtatgcgtaaagtaaaaatgcaagaacacaaactaaaattaaagaacaatgcaaagattaacaagattatcaaggaataaagtaaaacagatgagaaagcatcaatccaattcactaacccaagctatttgaatcatcatcatttccataagttgattctaacatgaacattcattcaatctcaatagaagtagttcaatcgattttactcctaaattgattgaaaccacaacactaactgaaatatcattcaattaatcttgtgattatcatttgaaattaagacatgaatccataatcctaattcactttcaatcccaaatgcattcataatcatgaaaacataatagaaattgaagaagaaggtgaatattcaagtagaaaccgaaataccgagtcggaactccaattcttctcttgcttgagttagatccttggattgattagtgatttagccttccatgatgatcaccaaggaaagccccatgaaatgagtgcagaaaaatggaagaatagcaaaatggaaatgaagaagatgaagaacaatgaagaacacttgagagaaaatgaagaacaagcttttgatcctaaaaactaaagaaaagaaatgtaaaacttgtttattgaattgtaagtgtgctgtccaagtttcactaagtcactaatacatatagtgactaagttctgaaaataaaatgggtcacaaacaagtccaacaatctaattatttgctatttacaaccatgaaagtcaaattcgcagcccaaaattacaagtgcagaggtgcaaacttccaagcttaaaatgaccctctaaatgacagaattggcctcgggctatttctagaaaacttgtagatcttttcattatctttccagggactcctagaaagctccattcggagatcggtagcaccctataggccttgcacaagtcagatacatcaagtgagccaaaaatccgaaaatacgcaacaattagcaattaagcccacttacttgcctaggcccaaaaactgaattagaataggaaaataaaggtcaaagagaggtcaaataagttaagaaggatagaaaaatattcaactaaaaaccctctatcaagactccctcaggatcaggaagagtcaacactggagttgtggtcaaccgctctttcaactcctggaaacactgctcgcactcatgagtccacacaaatggaacccccttccgtgtgagtcgagtcagaggtaccaccaactgggaaaacccctgaataaacctcctgtaatagccaactaatcccaggaaactcctgatctcagacacatcgttgggtatctcccaggacatcactgcctctatcttgctgggatccactgataccccagttgctgagatcacatggccaagaaacttcacctctgtcaaccaaaactcatatttggccagcttagcatacaactgtttgtccctcaagatctgaaggactgtcctgagatgctcgacgtgctctgtctccgtcttggagtagatcagaatgtcatcaatgaacaccaccacaaactgatctagaaaaggtctgaataccctgttcatataatccatgaacactgctggggcattcgtcagaccaaatggaatgacctgatactcaaagtgaccatacctagaccggaaggctgtcttaggtatgtctgtaggcttgatccgaatctgatgatatccggaactcaggtctatcttggagaacactttggctcccctcaactgatccaacagatcatcaatacgaggcagaggatacttgttcttcacattaaccttattcaactacctgtagtccacacaaagtctcatactaccgtccttcttcttcacaaagatcaccggtgctccccaaggtgaaacactcggtctgataaactgtttggacaacaggtcctccaactgcaccttcaactccctcaactccagaggagccatacggtaaggtaccacaaaaatcggtcccacaccaggaaccagatcaatggagaactctatctccctctctggtggtagttgagttatctcctcaggaaacacatctacgaactcgctcaccacagggatctgagacaaatcaacacttggcttatcttctgtcacacccaagaagatatagacctgagctccctcgatggttggcttgcgagcttgcaagactgataagaatgaggcagaactcgaactggtcccttcagaaggtactacaaccctattctgacaacagcctagcatcaccccatacttggtcatccagtccatacccacaatcatctcaagggtaggcatagctagatagaacaaatcaatcacataggttctgccctcatacaaaaacttcacgtccttgagcacgtgctaacctggcatctgtctctagatgctgtgataactgttgagttgagggggaactgaatgaagatcaagtaaagattcaatcaaggtgcaagtcttggagttttgactttcaacatggatcaagcattgaagatgattgtttgtgatttaatgtaaaagggttgaaagcatcatgatgatccaagtcattatagcattcatgtatcatttaagtattgcatcatagaggagttaagcagttaattagaaaattaagagaaagctaagaaaacagtatagaggagcaataatcgattactagctaatcttaatcgattattttgttcttaaggtttctggaaaaccaagcataaacactttaatcgattaccttatcgggttaatcgattacacacaacagcatacttgaaatttggtcgtgtgactgctttaatcgattaccataatgttgtaatcgattacatgctcattagataaaattggtcactctgccttaatcgattaccattaatagtaatcgattatcctttacaaacatgatttaagtgtaggactgcattagtcgattaccactggatgtaatcgattattctttataaaactgattttagcatatgcctgacttaatcgattacaattggatgtaatcgatttgtaaagacccttattcatggcgcttaaccccgcgcgatagcgcgggaattcaggagaaaaccatgcagagggtgtggcgcgagtcgcgccacaggtgacgcggatcgcgtgggaagtggcttggaaaaccagattcttctctggtatcccacgtgggtcgcgtggtggtatggcgcgagtcgcgcggtgtctcggcaggttcacgcgagtcgcgtggaggttcacgtatctcgcgtggaaggccagtgaggatggcgcgaatcacgtggtttcgggcgcgagtcgcgtgggaaggtcggtggagcgattataagaacgaaggtcgcgtttttctgagggaaaaaccctctctctctttccccacgaccccagcagccattagaggccttcccaagctttctaggaccttagatcatggcctaaacaccttccaatggtctttgatcttgaaaggaacccttgagagcgtaaatccttcatcctgttgtgagcaaaacccctatttctgagaaaccttcagagaggtggagagaactcgagattgaggaggaacggcgactacccacgggcaccggagcttggaggagcgttctagaggtcgggtgtgtcgccattgaggtaagaaactcgagtttctccggttgattttcagtttgggggttttgggtgaatagtgacccatctgtgatagggctagaattagctctgggtctagttgggagaagtgtttagaacactgataggatgaaggattagccttcaatttgtgatttggagaatgttggttcgggctctaggattaggcatgggtgactgtggttgagtcacttgatttggaacatgccagagcctttgtgatgggcttgtggtgcctgtgaggccaatagaacggagtctagtggtttagaccgttcaagccctgagaaaccctgtggttaggggttgagtgagctgagaagctcagtttgatggcctgtaaacgagtctgtggggactctgaggccaaagtaagctgtgttagaccattgatggtctatgaacaggcttgttgtgtgatgagcctgaggaacctaggataggtgacctgggttggtggagaggattgtgattcctttccctgaggcaagagtggttgcctgatgagcttatgtgttgaatggtctgtaatgtgctgttgtgtgccttggcagggcttgacactttgagtgtcagtgaagcagaccatcaagcaaggagcagagctgtggagcacggctaagaggtaagctcatcgttctggggattcgtcccttttctcttgtttgccacccggatgggtgatgttatgcatgccatgcttatgtgaacacatgtatatatgtgtatatgggcatgctgtttggattaaaaggccatggggcctatatatgtatgctatggcctagtgtgtgctaggctgaaatggtaaactcaggatagacaccgagaggtgtgagatggccttgggcctatgagtgatgatcactgagatgctcagtgttggaacctataggataccggactggtatcgggctagctgaggttccctagccagaggaagggtttgaggactccctggaacggctggtattccatgggaggtgccactgctctccacttaagtcctaaggattgatggaactgtgtgacgttcctccttaggcagagatgtgggaaagtcctgagcgtagggtctcaggcagatgtgcttgaagtcctggacggttattgccaggccagtgtggataagtcctgtggatggtgctcccgtagtggaatgacttcccaggcaagtgatggtaacctgtggatggtgcctccgtagtgagatgacttcccaggtagtggaaacccgtggatggtgcttcctttgtgagatgacttcccgggtagtggtgtgacctgtggatggtgcctccgtagtgagatgacttcccaggtagtgagaagccctgtggatggtgcctcctgtgtgagatgacttcccgggcagtgagagtcctgagtgctggtgcctccgtagtgagatgacgcctcaggccaatgttgtgaagtcctgagtgacggtgcctcctttgtgagatgacgcctcaggccaatgttgtgaagtcctgagtgacggtgcctcctttgtgagatgactcctcaggccagtgttggaagtcctaagagacgtgtgcctcctgtgtgagatgaactctcttaggcatgtgagttaagttctgaggatggtgcctcctgagtgagatgacttcccaggcagctaacagaaagtcctggatttggtttccaggccagttagtgaaagatatgttgtatctctaagagagggcttcccaaggggataagagcctagggcctcttagacgagccatatctggatatgtgaagtcctgagagatattcctcaggcatagtatgtttagtatgagacgatgcgtctctggttgacacagtgtccagtgagtgacactgatgagatgtacctctaggagacaggctgcgaaagccagagttagatgactggaccaggggcatggtttagacccctgagagatggctctagaagccaatgagaggcgtagacctcaaatgccttgggcatctcatgatgtgatcccagatggctgggaatctgtgtatgagcggagaatgtatctctagctcttttctttggttattcgtatgtcttagtggtgaaccagggtgagggaggtttttcccaggaccctgagcttgctgagacgtatgtctcaccctttgtgggttttcgtggtttttcaggtgcttcttctggagcagagaagcgacctcagggcaggaggccctagtggagaagacaggctggaggaggctgcagttgaagaccggagctggtctagttttggtttagagcagggtgtgtgtacacccgatttctgtacatattttatagatgaccgcctgtggtcatgtttggagcatgtatatgtacagtagttgagtttgtgtatgttatgtttcctcctgagtatatctgtataagttatatatctgcctattgtgtgtatgttttatctggatcagttctgtctgttttacgctttagttgtgttttaaattcatacataatgtaatcaagataaacgatcttgtcgcttccgcacaccgcatgtacaacgcttttagcgtggtttggtatcattaatgttagcacgtccggggtgttacacgattacactttacaatcagtatttttgctcaaacagatttaatcgattacgtatcgggttaatcgattatcttaaccattagttgaaaatctgattctgcattaatgattttaatcgattacaggagcgtgaggagcgcatttaatcgattaactctgttacgatttcaactataaatagaaacctttgcctttctgaaagtagaactaagagagatcattaccgagttgattttttacaatttctgagcattctctaaaggcatctaagagttcacaaaaggttgttctgggttcttgagtcttgcttcaatgattcattgatgggtaactaagattgttagtgaagcaagcttactcagtcacaaaggcttaggaattgattatgcatccttagattacattcaacctgaggtcattcattcatttgcatttctatcttggatcatcaggtgaattctttcctaaatctttgtgggtatttcgtttttctacaatatctttgtattttgttgattctattgtattggggttttgtaacaccccggacgtgctaacattaatgataccaaaccacgctaaaagcgttatacatgcggtgtgcggaagcgacaagatcgtttttcttgattacattatgtatgaaatttaaaacacaaccaaaacataaaacaacaaatactgaaccagataaaacacatacacaataggcagatacaagactgatacagatatactcaggaggaaacataacatacacaatctcaccactgtatatatacatgctcaaaaacatgaccacaggcggtcatttatgaaatacgtacagaaatagggtgtacacacacaccctgtctctaaccgacctaaaccagctcccactctggaagctctgcaccggtcttcaactgcagcctcctccagcctgatatcttcactagggcctcctgccctgaggtcgcttctttgctccagcagaagctcctgaaaaccacaaaccccacacagggtgagacatacgtctcagcaagctcagggtcctgggaaaaacctccctcaccctgttttaccaccaagacataaaatgaacagagaaaagagctagagatacattctccgctcatacacacactcccaacagtctgggatcataacacgggatgcccatggcatctgaggtctacacctcttactggctcctagagccatctttccggggtctcaaccatgcccctggcccaaccatctaactctggttttcgtagcctgtctcctagaggtacattatcatcagtgtcactcactggacactgtatccaccagagacacatcgtctcctactaaacctacaatgcctgaggactattactcaagacttcatatatccagatatggctcatttaagaggctctaggctcttctcccccttgagaagccctctcttagagatacaacatatctgtcactaactggcctgggaaacagatccaggactttctaccatctgcctgggaagtcctctcacacaggaggcaccgtcctcaggacttaaacccacatgcctaagagagttcatctcacacaggaggcacacgtctcttaggacttccaaccctggcctgaggagtcatctcacaaaggaggcaccgtcgctcaggactttccactactggcctgaggcgtcatctcacacaggaggcaccagcactcaggactttcactgcccgggaagtcatctcacaaaggaggcaccatccacagggcttctcactacctgggaagtcatctcacgacggaggcaccatccacaggtcataccactacccgggaagtcatctcacacaggaggcaccatccacgggttctccactacctgggaagtcatctcacacaggaggcaccatccacaggtcataccactacgggagcaccatccacaggacttatccacactggcctggaaataaccgtccaggacttcaaacacatctgcctgagaacctatgctcaggactttctcacatctctgcctaaggaggaacatcacacagttccatcagtccttaggacttaagtggagagcagtggcacctcccatggaataccagccgttccagggagtcctcaagcccttcctctggctagggaacctcagctagcccgataccagcccggtaccctataggttccatcacagaccatctcatggtctgcatccactcacatggcccacggccttacacctgactgatcaggtgcctcatacgactcaccatagcaggtgactatcctagggttcatccatttcagcctagcacacactagaccagagcatatatcataaaacataggccgcatggccttcaaatccaaacagcatgcccacatacacatatatacatgtgctcacacacgcatggcatgcattacatcacccatcagggtggcaaccaagggaaaagggggcgaatccccagaacgatgagcttacctctcttagccgaacttcatagctctgctcctggcttgatggtctgcttcattgacactctaagtgtcaagccctgtcaaggcacacaacacacattatagaccattcaacaacacataagctcgtcaggcaggcatccctgcctcagggaaaggaatcacaatcctctccatcaacttaggtcacctgcctaaggttcctcaggctcatctaaccacaagcctttctatagaccctcagtggtctacacaaatcaaccatggctttagagtcaccacagactcagcctcagccatcaactgagcttctcagctcactctacccctaaccacagggtttctcagggcttgaacggtctaatccactggactccgttcccttggcctcacaggcaccaccagcccatcattcaggctctggcatgtttcaaatcaagtgactcaaccacagtcacccatgcctatcctagagccagaacccacattctccaattcacaaattgaaagctaatccttcctcctcacatcattctaaacacttctctcaactggacccagagctaattctagcccaatcacagatgggtcactatttacccaaaacccccaaacagaaaatcaaccggagaaactcgagtttcttacctcaatggcgacacagatgacctctggaacgttcctcctagctccggtgtccgtggatagtcgccgttcctcctcaatctcgagttctctcaacctctctgaaggtttctcagaacttggggttttagggaatagggagggaggattctcgctctcaagggctcctctcaagatcaaaggccaatagaaggtgtttaggccatggtataaggtcctagaaagcttggggaggcctctaatggctgctagggccgtggggaaggaggaggagggtttttccctctgccacgcgaccttcgttcttataaaagcttcaccgaccttcccacgcgactcgcgcctgaaaccacgcacgtcgcgccataacaaaccacgcgactcgcgccatttaccacgcgactcgcgccgtttaccacgcgactcgcgccatacctacgggccttccacgcgaggtacgtgaacattcacgcgactcgcgtgaacctgccgagactccgcgcgactcgcgccatacccccacgcgacccacgtgggataccagagaagaatctggttttctaagcctcatcccacgcgatccacgtcgcctgtggcgcgacccgcgccacaccctctgcagggttttctgacctgaatccccgcgcgatcgcgcggggttaagcgccatgaataagggtctttacatattcacccctccttttaggaattctgtccgcagaattcttttctaagaacttagtcccatccaagactcgctacacatcacagtctgtgtaggatttatcagatttaactaatctgatcagctcagggcctttactctgtggcacacaaccacatcattccaactggaacacctgggaactacctcttccctaatcgaagcccatcctacacctgtgactgaaatagctccagacacatcggattaccttcgtccactgacaaggttctgtgtttggaccaaaatcctattcactgactctgagctcttctctacaacacttgatccccttcggatctgctcgcgagtccattgaaccatttcaggttcgagaagctgtttctaatacttccttctgccaaaacactggagtcctgcaccattggcttccacagagccccattaggtgccatgttcctcgaacatgcgaaatatcgcaaccaaggacctccatcaaggcagacatctaaccccgcatgtaccctactctaaggtacgttcacatatctaaattcctcaggatctagatgcctcactgcatcttgatcaactatctgaggataataggctaaccgaagcctctacggggttcccagttttctgaagtacacctcatctctcaaggttacttcagatccttgtcactaaccaagtgacctgctaaacacgagctatatacatagctatgcctcctctcctccttgaccacctgaaatcctcttaggatataacatatcacagtggccctcggatgactatcgaccagtcctcataactacataaggacggcatccaccagctaactaaaggcaccataacggcttaactcaacataagccaggtgcttccacagacatccttagctggtctagcaactctcgcagttcaatccggggatcgattccacagatcttccgctgcgcactctgatcctcatcatcactgatcactcccactggtgatcggaggatcctctgtccgagacagatacacatctctgacctgttcacactacccacggtcagagattatcaccaggcacggaacatctccatgctatcatgcttgaggtatcaacatctatcccagcctctgctggacatctcaagcatactggccatttggcctgaacctcccggtcccatcacatgatgagcaattcttttgctcccacaacggtgtatcctcatcaacgccatggcgtatcatcatcaacgcccagatgcatcatcatcagcatctaaactcagtgtgagactggcgactcacacctgtgccatcccaccggttgctaaccttaacggggatgtacacatatggtacctccgagaatagcaggaaactatctgaactattcccttgacctaggggatcatcatcatcccgggatcgtcatcacccatgagtgatgcttttcaatcatttcgaaaactagccaaagttattcaaaatgaaaaagaatgtaaaattgtttcaattagaagtgatcatggtggagaattccaaaatgaagattttgaaaaattctgtgaagaaaatggaagcaaccagaattttttagctccaagaacacctcaacaaaatggtgttgtggagaggaaaaatagatcacttgaagaaggtgctaggacacttctaaatgaaacaagtttacccaaatatttttgggctgatgctatacatacagtgtgctataccttgaatagacttctcataaggcatgttttaaagaaaactcactatgagttgtataaaggaagaaagcccaatgtttcacacttaagaacctttggctgtaagtgttttgtcttaaacaatggaaaggaatcacttgggaagtttgatgcaaaagctgatgaagctatcttccttggatattcattacaaagtaaagcatatagagtttttaataaaagaaccatgtgcattgaggaatctgtccatgtaatttgtgatgaatctaactcttcaaatgaagaaaaagtttgtgatgatgatgcaggaaattcataacagaatattcaattggagaagatgtccatcaatgagaaaaatgaaccaagtgtagaagaaggttcattaacaccaaaacaattgccaaaagagtggagaaccgctagagatctttcactagacaacattattggtgaagtatcaaagggagtctctactagatcttcaattagaaatttatgttgtgacatggcttttgtttctcaaattgaaccaaaagatatcaatcatgctttgcaagatgaacattggatgcatgccatgcatgaagaattgaatcaatttaaaagaaatgaagtttgggaacttgtccctaaacctccatccattaaacctataggtactaaatgggtttttagaaacaagctagatgaaagtggaattatagtcaaaaataaagctagattggttgcaaaaggttacaaccaagaggaaggtattgactatgaggaaacctttgctccagttgcaaggttagaagctattaggctgctgcttgcttatgcttgtatcatgggttttaaactttttcaaatagatgtgaaaagtgcatttttaaatggctatattgaggaggacatttatgttgaacaacctcctggattttcggattttcagcatccaaatcatgttttcaaacttaagaaatccctttatggtctgaaacaagcacctagatcatggtatgaaagattgagtaagtttcttcttgaccaatcttttataaggggcaatgttgataaaaccttgttcattaagaagcaaaagaatgatatgttactggttcaaatatatgttgatgacattatttttggtcaactaatccaaagctttgcaaaaatttctctgcagcaatgcaacaagaatttgagatgtctatgatgggagagctgacattcttcctaggattacaagtcaagcaattgaagaatggaatctttcttagtcaatccaagtactgccttgaagtaatcaagaagtttgaaatggacaaatgcaaagatgcagcaactccaatggccacttcaacttatcttgattcagatgaaagaggaaagaaagttgatgaatccaaatatagagggatgattggttcattactctatcttacagctagcaaaccagatataatgttaagtgttagcttgtgtgcaagatttcaagctaacccaaaggagtctcatctttcagttgtaaaaaggattatcaagtatctcaaggcaacacccaaagtggggctctggtatcctaaagatgcatcaattaatatcattggttattctgattcagattttgcaggatgtaagcttgataggaaaagcactagtggaacttgtcatctacttggaagctcactcatttcttggcactgcaaaaagcaagcttgtgtggctttatcaactgcagaagctgaatatatttcagcaagtagttgctgtgcgcaaagtatttggcttaagcaacaattacaagattatggagtagagttaaagaagatcccattgctgtgtgataatacaagtgccattaatatttcaaagaatcctgtgatgcattcaagaaccaagcacatagagattagacatcattttataagagatcatgtgcaaaaaggtaacatcaaggtagaatttattgatacacatcatcaacttgctgacatatttactaaacgtttgcctaaggatagattttacactcttagaaacatgctaggaattctggatgaacataacatatgctagcatgagtatgatttggtatatgtgcaattttgtgtgctgatttgcctttattattatcatcaaatgctctgattctatactttgaaagccatagtgttagtgttatactttgcatccaaaactagcaagctgtgcaaaatgataaaagaacctgttttctacttctcgtgctgacataatcgattaaaccatcggaataatcgattatttcaaataaaactaaaatcctgtttgaaaatcagatcattataatcgattacacaagatttgaaatcgattacgcttcacaaagtttaatgtatgtcactctggagtaatcgattacctatcggaataatcgattacgacattactaattcatcattgaaattctaggacgtgctggaataatcgattatcataaaagttaatcgattaaattgttcattcccaagttctaaaaacattaatggccatataatcgattacatttacattacaatcgattacgtttcatcttcaacctctgaccaactatatagtaagcgattacactgtataggtattattatatctcctctggaataatcgattacacaataatataatcgattattcaagctgttacgtgttttctaaattttttttaatctataaccgtccaatcaatgcattatgtgccatcaaaactgaccactcagaatctatgcaacttccaatgctttaaattcgttcccaacagttacatcttttgaaaagttgatcactgaactgcctttattatctataaatagctattgtctgtctttggaaaatctgcatcaagtctctcttccatttcttagtcttctcctttcttttcaaatcattatggttaaaccttggaagcctggagaattatccttctcaggaccttaaggctgagaccatgctaaagcttcaagaggatatcaaggctatgttatatggagtcttgaaagtcattagagagtgtccggatattgttaatggaaagcataaaaggacacagcttcagcaaatatcttagaattcattagattttgtctgatctgctttctagaattaggattcactagatttggtttttgccagatctgctctctatgtaataaatctagatttagtgtttgtctgatctgctttctatttgtaactttcagtttacatcaataaaattcgtgttttcatgtactctatttttctgctttgtatttctacattcaaatgtacttcttagcctctataaatgaaatttatgccttctgtttatcaattatccactgttattcaatttttgactttaaaaagccaaatagggggagaaaaattgaaaatcaaacgaaaatgcaaatgctctgcatcatactctgttcacctctatttttcgtgtcattttttaactgaattttcagttgcataaattgagaaattaagggggagttaagacttgaaaaagcttgataaagatacatatatgttaggaatgaataatgattaaagatcagatacctttaacacttgttcttggaaagaatttttgatttttcaggtaataagcaaagtacaaaaatactggaagccttctcattcaatcacaaagacccattgcttttcaattggaaatttggcatgtttaaagccaaaaagggggagattattgagttgagggggaactgaatgaagatcaagtaaagattcaatcaaggtgcaagttttggagttttgactttcaacatggatcaagcattgaagatgattgtttgtgatttaatgtaaaagggttgaaagcatcatgatgatccaagtcattatagcattcatgtatcatttaagtattgcatcatagaggagttaagcagttaattagaaaattaagagaaagctaagaaaacagcataaaggagcaataatcgattactagctaatcttaatagattattttgttcttaaggtttctggaaaaccaagcataaacactttaatcgattaccttatcgggttaatcgattacacacaactcagcatacttgaaatttggtcgtgtgactgctttaatcgattaccataatgttgtaatcgattacatgctcattagataaaattggtcactctgccttaatcgattaccattaatagtaatcgattattcttcacaaacatgatttaagtgtaggactgcattagtcgattaccactggatgtaatcgattattctttataaaactgattttagcatatgtctgacttaatcgattacaattggatgtaatcgattacactttacaatcagtatttttgctcaaacagatttaatcgattacgtatcgggttaatcgattatcttaaccattagttgaaaatctgattctgcattaatgattttaatcgattacaggagcgtgaggagcgcatttaatcgattaactctgttacgatttcaactataaatagaaccctttgcctttctgaaagtagaactaagagagatcattactgagttgattttttacgatttctgagcattctttaaaggcatctaagagttcacaaaaggttgttctgggttcttgagtcttgcttcaatgattcattgatgggtaactaagattgttagtgaagcaagcttactcagtcacaaaggcttaggaattgattatgcatccttagattacattcaacctgaggtcattcattcatttgcatttctatcttggatcatcaggtgaattctttcctaaatctttgtgggtatttcgtttttctgcaatatctttgtattttgttgattctattgtattggggtttcttgcaagaggggatagtgtttctccaagggagataggttttctccaaagacaactgagtaggtttctcagtgtgggtttagcttctaagggtctaatagggttttagatcactgaactttctctagggttgagaaagagaagtttgtaatatcttgtaagaaatatatttgcaatagtagaactctactctagtgttgagtagaagaaactggatgtagcctctgttttgaggtgaacctgtataaatcttgtttcttgttttaattactgcattctttatagtttctgattgaactctgttttctgtgtgtttaaaatttaagcatatcaagtcttggattgaacttggataaggatattcatttagttttgtgataaagatccaaagggcatttttaactctgattttaaacaagaaaattttgaatatctatacttaaccaattcaccccccctcttggttaattgtgaatgtttcttattttccacaattggcatcaagagctaggtcttgtaagatactcaagatcactgcatttttatcaaaatgaacacctcacaaataacctttaaggaaggagcatccttaaacagacctcctttatttgagggggagcatttcagcttttggaaaaatagaatgaagatctttatccaatccaatggtccaggagcatggaatgctattgagaaaggcccaagaatgcctattaagatggtagataacaacatgattcccaaagattgggatgagatgaatgatgatgagaaaagaattgttcaatatgattttaaatcaaagaatatgataacttctgctctatcttctgatgaatttttcagcaccgttcgatgtgcaagtgctaaggagatgtgggagatgttggagatcacccatgaaggtactgaggaagtaagaaggtcaagaaagcattccttgattcatgaatatgaaatgttcaaaatgaatcaaaatgagagtatttcccagcttcaaacaaggttcacacacatagtgaatcatctcctaggacttggcaaaacttttgatgctgaagaacttaacatcaagattctgaaatgtctcactagagcatggcaacccaaagtcacagctatcaaggaatcaaaggatttatcaaagatgtcaatggctgcactttttggtaagttgcttgaatatgaacttgaactatctcagctaacctttggtgaagatgcagataggaaaaacaaaggaattgcactaaaatctgcaacacccaaggctgaaaaggatgaggactctagtgaagaagaggaagatgaaagcatgaacttgttagctaagaaattcagcaaattcatgaagaaaaacaaaggcagaaagttctcaagaaataataagaacaattcaacaaacaacagctccaacaatttcaagaagatggataacaactatacttgctttgaatgtggcaaacctggtcacataaaatctgaatgttccgtatacttgaagaaacaacagcaggacagcaaagggaagaaggaattcaaaccgagaaaagcatatattgcatgggaagataatgatacttctacctctgattcctctactaatttggaagaagcaaacatgtgtctaacctccatcatcaatgaagaaaatgatgatctgctaagtgaagatgaagaggtaacttctgaacttgaacaagctattttagcatttcaagagatgcacaaagaagcaaaaaaattggctaagtcaaatagcaagcttaaaaagagcatggaagaacatcttgcaaaaacaattgagctggaaactgagatttgtaacctgagaaaagaaaatgataatctgacctcaagttacaaatcaagtggatgtatgtgcacttcttcttctacctctagtgataagtatgaaatgctgcaaaaagtgtttgatgaatacagaattaattaagaagaaaagtatatgcagcaagtttcaaagaaccaagaattgattgacatcttggaaaaactcaacagaggaaagtgtgatctagatgaaatgttgagtgctcaaaaacaatatggagacacctctggtttggggtataaaaagagctttaaaaatatgcagaaaactaagtttgtactcccacaacagcagcaaaagaaaaggccaagagtcaatcaaagaaggttttctagaaaaagatacaatgttgtaacttgtcactattgtatgaaaaaaggccatgcagcttttcattgttttgcaagaaggttctatgtcccaaatggtgaatgtattttggtagagaagaaaaagaaaacagctaacccacttggacccataagaaaatgggtacccattccttcaaagtaatctgtctcttttgtaggtgtgtctaagagcaagctcatctctatggtaccttgatagtggatgctcaagacacatgatgggtgacatgtctctgctcaagaatctcacatttaaagaaggaggctttgtcacttatggagacaacaataaaggaaagattatgggtgaaggaagtattggtgacagcttaaacactaaaatcagcaatgtgctttatgttgaagggctgaaacacaacttgctcagcattagtcaattaagtgataaaggccacaagatatccttcaatcaagattgttgcttgatttgtgatggcataagtaatgaggtaattcatataggcaagaggaaaggtaatgtgtatctactttctattgatcatgccttgtttcacaaaactacatgtttattaagtaaattgaatgaaacatggctgtggcataagagagctagtcatataaatatgcatcatatgaataagctaattaagaaggacttagtcattggattgcctaaactcaaatttgagaaagacaaattgtgtgatgcatgtcaaaaggggaaacaaacaaaaatttattttcaaagtaaaaacattgtttccacctctatacctcttgagcttttacacatggattagtttggtccttcaagaaccatgagtttagggggcaattactatggacttgttattgttgatgatttctctagattcacatggactttgtttttaaaatccaagagtgatgcttttcaatcatttcgaaaactagccaaagttattcaaaatgaaaaagaatgtaaaattgtttcaattagaagtgatcatggtggagaattccaaaatgaagattttgaaaaattctgtgaagaaaatggaatcaaccagaattttttagctccaagaacacctcaacaaaatggtgttgtggagaggaaaaatagatcacttgaagaaggtgctaggacacttctaaatgaaacaagtttacccaaatatttttgggctgatgctatacatacagtgtgctataccttgaatagacttctcataaggcctgttttaaagaaaactcactatgagttgtataaaggaagaaagcccaatgtttcacacttaagaacctttggctgtaagtgttttgtcttaaacaatggaaaggaatcacttgggaagtttgatgcaaaagctgatgaagctatcttccttggatattcattacaaagtaaagcatatagagtttttaataaaagaaccatgtgcattgaggaatctgtccatgtaatttgtgatgaatctaactcttcaaatgaagaaaaagtttgtgatgatgatgcaggaaattcataacagaatattcaattggagaagatgtccatcaatgagaaaaatgaaccaagtgtagaagaaggttcattaacaccaaaacaattgccaaaagagtggagaaccgctagagatctttcactagacaacattattggtgaagtatcaaagggagtctctactagatcttcaattagaaatttatgttgtgacatggcttttgtttctcaaattgaaccaaaagatatcaatcatgctttgcaagatgaacattggatgcatgccatgcatgaagaattgaatcaatttaaaagaaatgaagtttgggaacttgtccctaaacctccatccattaaacctataggtactaaatgggtttttagaaacaagctagatgaaagtggaattatagtcaaaaataaagctagattggttgcaaaaggttacaaccaagaggaaggtattgactatgaggaaacctttgctccagttgcaaggttagaagctattaggctgctgcttgcttatgcttgtatcatgggttttaaactttttcaaatagatgtgaaaagtgcatttttaaatggctatattgaggaggacatttatgttgaacaacctcctggattttcggattttcagcatccaaatcatgttttcaaacttaagaaatccctttatggtctgaaacaagcacctagatcatggtatgaaagattgagtaagtttcttcttgaccaatcttttataaggggcaatgttgataaaaccttgttcattaagaagcaaaagaatgatatgttactggttcaaatatatgttgatgacattatttttggtcaactaatccaaagctttgcaaaaatttctctgcagcaatgcaacaagaatttgagatgtctatgatgggagagctgacattcttcctaggattacaagtcaagcaattgaagaatggaatctttcttagtcaatccaagtactgccttgaagtaatcaagaagtttgaaatggacaaatgcaaagatgcagcaactccaatggccacttcaacttatcttgattcagatgaaagaggaaagaaagttgatgaatccaaatatagagggatgattggttcattactctatcttacagctagcaaaccagatataatgttaagtgttagcttgtgtgcaagatttcaagctaacccaaaggagtctcatctttcagctgtaaaaaggattatcaagtatctcaaggcaacacccaaagtggggctctggtatcctaaagatgcatcaattaatatcattggttattctgattcagattttgcaggatgtaagcttgataggaaaagcactagtggaacttgtcatctacttggaagctcactcatttcttggcactgcaaaaagcaagcttgtgtggctttatcaactgcaaaagctgaatatatttcagcaagtagttgctgtgcgcaaagtatttggcttaagcaacaattacaagattatggagtagagttaaagaagatcccattgctgtgtgataatacaagtgccattaatatttcaaagaatcctgtgatgcattcaagaaccaagcacatagagattagacatcattttataagagatcatgtgcaaaaaggtaacatcaaggtagaatttattgatacacatcatcaacttgctgacatatttactaaacgtttgcctaaggatagattttacactcttagaaacatgctaggaattctggatgaacataacatatgctagcatgagtatgatttggtatatgtgcaattttgtgtgctgatttgcctttattattatcatcaaatgctctgattctatactttgaaagccatagtgttagtgttatactttgcatccaaaactagcaagctgtgcaaaatgataaaagaacctgttttctacttctcgtgctgacataatcgattaaaccatcggaataatcgattatttcaaataaaactaaaatcctgtttgaaaatcagatcattataatcgattacacaagatttgaaatcgattacgcttcacaaagtttaatgtatgtcactctggagtaatcgattacctatcggaataatcgattacgacattactaattcatcattgaaattctaggacgtgctggaataatcgattatcataaaagttaatcgattaaattgttcattcccaagttctaaaaacattaatggccatataatcgattacatttacattacaatcgattacgtttcatcttcaacctctgaccaactatatagtaagcgattacactgtataggtattattatatctcctctggaataatcgattacacaataatataatcgattattcaagctgttacgtgttttctaaattttttttaatctataaccgtccaatcaatgcattatgtgccatcaaaactgaccactcagaatctatgcaacttccaatgctttaaattcgttcccaacagttacatcttttgaaaagttgatcactgaactgcctttattatctataaatagctattgtctgtctttggaaaatctgcatcaagtctctcttccatttcttagtcttctcctttcttttcaaatcattatggttaaaccttggaagcctggagaattatccttctcaggaccttaaggctgagaccatgctaaagcttcaagaggatatcaaggctatgttatatggagtcttgaaagtcattagagagtgtccggatattgttaatggaaagcataaaaggacacagcttcagcaaatatcttagaattcattagattttgtctgatctgctttctagaattaggattcactagatttggtttttgccagatctgctctctatgtaataaatctagatttagtgtttgtctgatctgctttctatttgtaactttcagtttacatcaataaaatttgtgttttcatgtactctatttttctgctttgtatttctacattcaaatgtacttcttagcctctataaatgaaatttatgccttctgtttatcaattatccactgttattcaatttttgactttaaaaagccaaatagggggagaaaaattgaaaatcaaacgaaaatgcaaatgctctgcatcatactctgttcacctctatttttcgtgtcattttttaactgaattttcagttgcataaattgagaaattaagggggagttaagacttgaaaaagcttgataaagatacatatatgttaggaatgaataatgattaaagatcagatacctttaacacttgttcttggaaagaatttttgatttttcaggtaataagcaaagtacaaaaatactggaagccttctcattcaatcacaaagacccattgcttttcaattggaaatttggcatgtttaaagccaaaaagggggagattattgagttgagggggaactgaatgaagatcaagtaaagattcaatcaaggtgcaagttttggagttttgactttcaacatggatcaagcattgaagatgattgtttgtgatttaatgtaaaagggttgaaagcatcatgatgatccaagtcattatagcattcatgtatcatttaagtattgcatcatagaggagttaagcagttaattagaaaattaagagaaagctaagaaaacagcataaaggagcaataatcgattactagctaatcttaatagattattttgttcttaaggtttctggaaaaccaagcataaacactttaatcgattaccttatcgggttaatcgattacacacaactcagcatacttgaaatttggtcgtgtgactgctttaatcgattaccataatgttgtaatcgattacatgctcattagataaaattggtcactctgccttaatcgattaccattaatagtaatcgattattcttcacaaacatgatttaagtgtaggactgcattagtcgattaccactggatgtaatcgattattctttataaaactgattttagcatatgtctgacttaatcgattacaattggatgtaatcgattacactttacaatcagtatttttgctcaaacagatttaatcgattacgtatcgggttaatcgattatcttaaccattagttgaaaatctgattctgcattaatgattttaatcgattacaggagcgtgaggagcgcatttaatcgattaactctgttacgatttcaactataaatagaaccctttgcctttctgaaagtagaactaagagagatcattactgagttgattttttacgatttctgagcattctttaaaggcatctaagagttcacaaaaggttgttctgggttcttgagtcttgcttcaatgattcattgatgggtaactaagattgttagtgaagcaagcttactcagtcacaaaggcttaggaattgattatgcatccttagattacattcaacctgaggtcattcattcatttgcatttctatcttggatcatcaggtgaattctttcctaaatctttgtgggtatttcgtttttctgcaatatctttgtattttgttgattctattgtattggggtttcttgcaagaggggatagtgtttctccaagggagataggttttctccaaagacaactgagtaggtttctcagtgtgggtttagcttctaagggtctaatagggttttagatcactgaactttctctagggttgagaaagagaagtttgtaatatcttgtaagaaatatatttgcaatagtagaactctactctagtgttgagtagaagaaactggatgtagcctctgttttgaggtgaacctgtataaatcttgtttcttgttttaattactgcattctttatagtttctgattgaactctgttttctgtgtgtttaaaatttaagcatatcaagtcttggattgaacttggataaggatattcatttagttttgtgataaagatccaaagggcatttttaactctgattttaaacaagaaaattttgaatatctatacttaaccaattcaccccccctcttggttaattgtgaatgtttcttattttccacaattggcatcaagagctaggtcttgtaagatactcaagatcactgcatttttatcaaaatgaacacctcacaaataacctttaaggaaggagcatccttaaacagacctcctttatttgagggggagcatttcagcttttggaaaaatagaatgaagatctttatccaatccaatggtccaggagcatggaatgctattgagaaaggcccaagaatgcctattaagatggtagataacaacatgattcccaaagattgggatgagatgaatgatgatgagaaaagaattgttcaatatgattttaaatcaaagaatatgataacttctgctctatcttctgatgaatttttcagcaccgttcgatgtgcaagtgctaaggagatgtgggagatgttggagatcacccatgaaggtactgaggaagtaagaaggtcaagaaagcattccttgattcatgaatatgaaatgttcaaaatgaatcaaaatgagagtatttcccagcttcaaacaaggttcacacacatagtgaatcatctcctaggacttggcaaaacttttgatgctgaagaacttaacatcaagattctgaaatgtctcactagagcatggcaacccaaagtcacagctatcaaggaatcaaaggatttatcaaagatgtcaatggctgcactttttggtaagttgcttgaatatgaacttgaactatctcagctaacctttggtgaagatgcagataggaaaaacaaaggaattgcactaaaatctgcaacacccaaggctgaaaaggatgaggactctagtgaagaagaggaagatgaaagcatgaacttgttagctaagaaattcagcaaattcatgaagaaaaacaaaggcagaaagttctcaagaaataataagaacaattcaacaaacaacagctccaacaatttcaagaagatggataacaactatacttgctttgaatgtggcaaacctggtcacataaaatctgaatgttccgtatacttgaagaaacaacagcaggacagcaaagggaagaaggaattcaaaccgagaaaagcatatattgcatgggaagataatgatacttctacctctgattcctctactaatttggaagaagcaaacatgtgtctaacctccatcatcaatgaagaaaatgatgatctgctaagtgaagatgaagaggtaacttctgaacttgaacaagctattttagcatttcaagagatgcacaaagaagcaaaaaaattggctaagtcaaatagcaagcttaaaaagagcatggaagaacatcttgcaaaaacaattgagctggaaactgagatttgtaacctgagaaaagaaaatgataatctgacctcaagttacaaatcaagtggatgtatgtgcacttcttcttctacctctagtgataagtatgaaatgctgcaaaaagtgtttgatgaatacagaattaattaagaagaaaagtatatgcagcaagtttcaaagaaccaagaattgattgacatcttggaaaaactcaacagaggaaagtgtgatctagatgaaatgttgagtgctcaaaaacaatatggagacacctctggtttggggtataaaaagagctttaaaaatatgcagaaaactaagtttgtactcccacaacagcagcaaaagaaaaggccaagagtcaatcaaagaaggttttctagaaaaagatacaatgttgtaacttgtcactattgtatgaaaaaaggccatgcagcttttcattgttttgcaagaaggttctatgtcccaaatggtgaatgtattttggtagagaagaaaaagaaaacagctaacccacttggacccataagaaaatgggtacccattccttcaaagtaatctgtctcttttgtaggtgtgtctaagagcaagctcatctctatggtaccttgatagtggatgctcaagacacatgatgggtgacatgtctctgctcaagaatctcacatttaaagaaggaggctttgtcacttatggagacaacaataaaggaaagattatgggtgaaggaagtattggtgacagcttaaacactaaaatcagcaatgtgctttatgttgaagggctgaaacacaacttgctcagcattagtcaattaagtgataaaggccacaagatatccttcaatcaagattgttgcttgatttgtgatggcataagtaatgaggtaattcatataggcaagaggaaaggtaatgtgtatctactttctattgatcatgccttgtttcacaaaactacatgtttattaagtaaattgaatgaaacatggctgtggcataagagagctagtcatataaatatgcatcatatgaataagctaattaagaaggacttagtcattggattgcctaaactcaaatttgagaaagacaaattgtgtgatgcatgtcaaaaggggaaacaaacaaaaatttattttcaaagtaaaaacattgtttccacctctatacctcttgagcttttacacatggattagtttggtccttcaagaaccatgagtttagggggcaattactatggacttgttattgttgatgatttctctagattcacatggactttgtttttaaaatccaagagtgatgcttttcaatcatttcgaaaactagccaaagttattcaaaatgaaaaagaatgtaaaattgtttcaattagaagtgatcatggtggagaattccaaaatgaagattttgaaaaattctgtgaagaaaatggaatcaaccagaattttttagctccaagaacacctcaacaaaatggtgttgtggagaggaaaaatagatcacttgaagaaggtgctaggacacttctaaatgaaacaagtttacccaaatatttttgggctgatgctatacatacagtgtgctataccttgaatagacttctcataaggcctgttttaaagaaaactcactatgagttgtataaaggaagaaagcccaatgtttcacacttaagaacctttggctgtaagtgttttgtcttaaacaatggaaaggaatcacttgggaagtttgatgcaaaagctgatgaagctatcttccttggatattcattacaaagtaaagcatatagagtttttaataaaagaaccatgtgcattgaggaatctgtccatgtaatttgtgatgaatctaactcttcaaatgaagaaaaagtttgtgatgatgatgcaggaaattcataacagaatattcaattggagaagatgtccatcaatgagaaaaatgaaccaagtgtagaagaaggttcattaacaccaaaacaattgccaaaagagtggagaaccgctagagatctttcactagacaacattattggtgaagtatcaaagggagtctctactagatcttcaattagaaatttatgttgtgacatggcttttgtttctcaaattgaaccaaaagatatcaatcatgctttgcaagatgaacattggatgcatgccatgcatgaagaattgaatcaatttaaaagaaatgaagtttgggaacttgtccctaaacctccatccattaaacctataggtactaaatgggtttttagaaacaagctagatgaaagtggaattatagtcaaaaataaagctagattggttgcaaaaggttacaaccaagaggaaggtattgactatgaggaaacctttgctccagttgcaaggttagaagctattaggctgctgcttgcttatgcttgtatcatgggttttaaactttttcaaatagatgtgaaaagtgcatttttaaatggctatattgaggaggacatttatgttgaacaacctcctggattttcggattttcagcatccaaatcatgttttcaaacttaagaaatccctttatggtctgaaacaagcacctagatcatggtatgaaagattgagtaagtttcttcttgaccaatcttttataaggggcaatgttgataaaaccttgttcattaagaagcaaaagaatgatatgttactggttcaaatatatgttgatgacattatttttggtcaactaatccaaagctttgcaaaaatttctctgcagcaatgcaacaagaatttgagatgtctatgatgggagagctgacattcttcctaggattacaagtcaagcaattgaagaatggaatctttcttagtcaatccaagtactgccttgaagtaatcaagaagtttgaaatggacaaatgcaaagatgcagcaactccaatggccacttcaacttatcttgattcagatgaaagaggaaagaaagttgatgaatccaaatatagagggatgattggttcattactctatcttacagctagcaaaccagatataatgttaagtgttagcttgtgtgcaagatttcaagctaacccaaaggagtctcatctttcagctgtaaaaaggattatcaagtatctcaaggcaacacccaaagtggggctctggtatcctaaagatgcatcaattaatatcattggttattctgattcagattttgcaggatgtaagcttgataggaaaagcactagtggaacttgtcatctacttggaagctcactcatttcttggcactgcaaaaagcaagcttgtgtggctttatcaactgcaaaagctgaatatatttcagcaagtagttgctgtgcgcaaagtatttggcttaagcaacaattacaagattatggagtagagttaaagaagatcccattgctgtgtgataatacaagtgccattaatatttcaaagaatcctgtgatgcattcaagaaccaagcacatagagattagacatcattttataagagatcatgtgcaaaaaggtaacatcaaggtagaatttattgatacacatcatcaacttgctgacatatttactaaacctttgcctaaggatagattttacactcttagaaacatgctaggaattctggatgaacataacatatgctagcatgagtatgatttggtatatgtgcaattttgtgtgctgatttgcctttattattatcatcaaatgctctgattctatactttgaaagccatagtgttagtgttatactttgcatccaaaactagcaagctgtgcaaaatgataaaagaacctgttttctacttctcgtgctgacataatcgattaaaccatcggaataatcgattatttcaaataaaactaaaatcctgtttgaaaatcagatcattataatcgattacacaagatttgaaatcgattacgcttcacaaagtttaatgtatgtcactctggagtaatcgattacctatcggaataatcgattacgacattactaattcatcattgaaattctaggacgtgctggaataatcgattatcataaaagttaatcgattaaattgttcattcccaagttctaaaaacattaatggccatataatcgattacatttacattacaatcgattacgtttcatcttcaacctctgaccaactatatagtaagcgattacactgtataggtattattatatctcctctggaataatcgattacacaataatataatcgattattcaagctgttacgtgttttctaaattttttttaatctataaccgtccaatcaatgcattatgtgccatcaaaactgaccactcagaatctatgcaacttccaatgctttaaattcgttcccaacagttacatcttttgaaaagttgatcactgaactgcctttattatctataaatagctattgtctgtctttggaaaatctgcatcaagtctctcttccatttcttagtcttctcctttcttttcaaatcattatggttaaaccttggaagcctggagaattatccttctcaggaccttaaggctgagaccatgctaaagcttcaagaggatatcaaggctatgttatatggagtcttgaaagtcattagagagtgtccggatattgttaatggaaagcataaaaggacacagcttcagcaaatatcttagaattcattagattttgtctgatctgctttctagaattaggattcactagatttggtttttgccagatctgctctctatgtaataaatctagatttagtgtttgtctgatctgctttctatttgtaactttcagtttacatcaataaaattcgtgttttcatgtactctatttttctgctttgtatttctacattcaaatgtacttcttagcctctataaatgaaatttatgccttctgtttatcaattatccactgttattcaatttttgactttaaaaagccaaatagggggagaaaaattgaaaatcaaacgaaaatgcaaatgctctgcatcatactctgttcacctctatttttcgtgtcattttttaactgaattttcagttgcataaattgagaaattaagggggagttaagacttgaaaaagcttgataaagatacatatatgttaggaatgaataatgattaaagatcagatacctttaacacttgttcttggaaagaatttttgatttttcaggtaataagcaaagtacaaaaatactggaagccttctcattcaatcacaaagacccattgcttttcaattggaaatttggcatgtttaaagccaaaaagggggagattattgagttgagggggaactgaatgaagatcaagtaaagattcaatcaaggtgcaagttttggagttttgactttcaacatggatcaagcattgaagatgattgtttgtgatttaatgtaaaagggttgaaagcatcatgatgatccaagtcattatagcattcatgtatcatttaagtattgcatcatagaggagttaagcagttaattagaaaattaagagaaagctaagaaaacagcataaaggagcaataatcgattactagctaatcttaatagattattttgttcttaaggtttctggaaaaccaagcataaacactttaatcgattaccttatcgggttaatcgattacacacaactcagcatacttgaaatttggtcgtgtgactgctttaatcgattaccataatgttgtaatcgattacatgctcattagataaaattggtcactctgccttaatcgattaccattaatagtaatcgattattcttcacaaacatgatttaagtgtaggactgcattagtcgattaccactggatgtaatcgattattctttataaaactgattttagcatatgtctgacttaatcgattacaattggatgtaatcgattacactttacaatcagtatttttgctcaaacagatttaatcgattacgtatcgggttaatcgattatcttaaccattagttgaaaatctgattctgcattaatgattttaatcgattacaggagcgtgaggagcgcatttaatcgattaactctgttacgatttcaactataaatagaaccctttgcctttctgaaagtagaactaagagagatcattactgagttgattttttacgatttctgaacattctttaaaggcatctaagagttcacaaaaggttgttctgggttcttgagtcttgcttcaatgattcattgatgggtaactaagattgttagtgaagcaagcttactcagtcacaaaggcttaggaattgattatgcatccttagattacattcaacctgaggtcattcattcatttgcatttctatcttggatcatcaggtgaattctttcctaaatctttgtgggtatttcgtttttctgcaatatctttgtattttgttgattctattgtattggggtttcttgcaagaggggatagtgtttctccaagggagataggttttctccaatgacaactgagtaggtttctcaatgtgggtttagcttctaagggtctaatagggttttagatcactgaactttctctagggttgagaaagagaagcttgtaatatcttgtaagaaatatatttgcaatagtagaactctactctagtgttgagtagaagaaactggatgtagcctctagttttgaggtgaaccagtataaatcttgtttcttgttttaattattgcattctttatagtttctgattgaactctgttttctgtgtgtttaaaatttaagcatatcaagtcttggattgaacttggataaggatattcatttagttttgtgataaagatccaaagggcatttttaactctgatttttaacaagaaaattttgaatatctatacttaaccaattcacccccctcttggttaattgtgagtgtttcttattttccacaataacctccatcggaggggcaaaattgagtttaggcaatctgagcctatcaacaatcacatcctgaatgaaggaatgtgtggctccagaatcaaacaacactctaatatcacaatcatcgatcagaactgtaccactgatcaagtttggagctctggctgcctctctggcgtctacagtatacacccgccctgctgtgggtgccatcacatctgctggagcagcctgtaccggtctctctgtctgtgggcactctctggatttgtggcctggcttgccacagcggaaactgataatctggcctgaggaataggctcctgtatgctccttcccacaagctagacacttggtaactgatctcctccgggccaaacccctcttgaatctgtcagagggtgtagagactctcaacatctttcccttgccctttcctgacgggctagaaccattgggccttctcccctcctgtctgtctgagggagtaggctgtccgcctctctgctgtctctgtaggataccctccacctggcgactctgtctcaccagggtatccatatctcgtgacccaagaccagctaccaacacctgaatgtcgtctctaagtcccctgaggaacttagctgctagaatctcagcttcaggcataggtctcctgaagtgtgcatactgagccatctcattaaactgggccagatactcgtccaccgtcatggtcccctgaacgagtccatcaaactcagcctgcttctgctcctgggcatctctaggaaaatacctgtccaggaaacaggccttgaacaactgccaggtaatcacctctccctggcctctcagaagtgaaactgtggtcttccaccacttatgggcgtcaccctgaagcatataggttgcatacagcaacctctggtgatcggggcactccatcacctcgaaaatcttctctaaggattgcagccaccctgctgcagccactggatcatagccccctgagaacactggagggtcatgctttttgaatgtaatcagcatcttccctctagctactggatcactctcagcctctacttgggacatcagatcccctctctggtgactcccaccagtctgctggcgactaccctcgccatcaaggataggaggtgtggaggatgctctgtcatctctcctgaggttcttcacctcctctagcaaatcatgattagccttcatcaaggcttcattcacctctcgggttgcagccatctctcgccgcatctccccccgagtctgtctgtttgcagccatctcttgctacatatctgcctaaacctatctattagcagctaactctgcctgcatggtgaccagtgcagctgcaactggatcagtctgggcactggtagccccacgggtgcctctaggtctcaccatggcactacacatgtacatcacacagtgagttgatcaggcccacagttaatgcaccctcatgcaatgctcatgtcaaacaaccacagacaagcaccaaatcaatttccatacataatgttctcatcaagaaaccgctctgataccattaaatgtaacaccccgtaggcctccgacgtgttatcattaataatatcagtttagcacttaaaacatgatttcaaatctcagcggaagcatagaatcgctttttttgattcattatgtatggaataaaacatatcacataacacacacacaagacaattaaacacacccctactgatccaattactcataacatacaccataaagacaaataactaaaaggcttaggcagattatcaattatacaatatttatacttaggaggaaagtctcatatacatatcataaatagttctgtacaaacatatacatcacagttcacgccacattatggtgatacaaaagaatatctgccctcacagagggtatacagaactatacatgtatcaggtgtacacacacaccatcccttatcaagggtacaaaatataatcaaaacaaatctgagccttcaagctccatctactgcttctcagtcaagcagcccatgtctctactggggcctcctgccttgagactgctctcttcctccagaagagtcacctgaaatcataattccccacacggggtgagataacacatctcagtaagctcagggtccatggaggcatctcctccaccctgacccacttccataacacatacatcagataacacaagcaattggcccactggcctggccctctggcccttataacaatataagcatatcatacaaacatggcggagctgcctcaatgcctggcggagctacctcaatgcctatatcagtgtgagaccggcactcacacctgtgccatcccattgggtgctaacccttcgcatgaatgcacaatatatggtacctccgagaatagaaggagctacctcaacttctattcccctggcctgtgggaaccaatcccctgggagctacctcaaccatgagctagccatgctaggaggaaaccaccatctcctagggaggtccatatctatctattggccaacagatctatcacagtcatatcacatcacaaatcaaacacagatgcatacatatatcattatgaggatgcaactaccaatgcatgcatcatgaaatgaccaccactcccccagagtgtggtgtggcacacaagatgggaaatcatcccaaggaacactgaacttacctggcaaggtctcagtctgtggtactgtccctgctctgtggctcccgccacaaatagtctcaaaatcaagccctaatcaaggcatatgcagtctcatatcaaaatcaatccaatagacattcaatcagaacatatcatagcagaattcccctatcctagggttcaatcaaatcaagccatcattatgcttctctcagaccatacaaggtccaccatggctgcatacaaagcatctgagtcatcacagactcaatgcagctcacctaacagagcataatctcacagaagcctcatggttcaaaatcactggaacggcctaaaacttaaccaaggcaccattccactagcctctcaggatcaacacaagcagaatcaaggctctggcatggctccaaaaccacaagtgacttatcacacaagccacacatacaagccacagagccaagattcaaagttctctaaatcagaaactgaaagctaatccttcatcactaaaccattctaaacaagtttctctacaggaccctgggctaattctagccccagctcaagtgggtcactattcatagaaacccccaggatcaaaagtaaacggagaaacttgagtctcttacctcagtggcgactagaaagacttcagggcagcttcctcaagctctgttgtccttcccaagccgtgggtcctcgccagtctcaagttctctgagcttttccttgagaatccaattctcactctcaaggggtttttaagaaaaaggatgaaggatttaagctctcaaagggtttctctcacaatcacaagtcattgggaggtgttttagccaagccaaaaggtcctagaaagcttgggatactctctaatggaggctggggtcgtggggaagaagaagcacagattttccccttcattttcgagtttttggccttatatagtggccctgcccgagctctggcgcgatccgcgccaactcctgcactacccgtgccgcaatggcggtgggtctggcgcttccagcaccactccctcgcctccagcgccagcttccagaacctatggcgctatccgtgccaaccttggcgctggccacgtggaaaaccagggaaaatgagttttctaggccacttcccgtgccaaccgcgctgcccttggcgcgactcgcgctggctggaaaacctctggcgcccttggcgccacattgacgcccctggcgtcagcttccagagaacctggcactcccacgccacattccagtgggtctagcgggatcagcgccaacccttgcgccatccgcgccacacccttaacagggttttttgctaaataaacctggcacaaaagtgagggtccttaaactatgaaattggagtttctcagaaagaaaaataattactgtttggcccaaaatctcacaggtgctaaactcaagtcaatcattgctaacttcatttcaagcaacatttcaacttcaacatgcatatcatatagcaacaattcaaattccattcatgtatcatgcaattcatgctatgtttcatttcacaaaagctttcatcagagaaatcctatccattactgtgtacattcactttttaatctgaaaaatctgatgtgttgccaacttttattgaaatattcagctaaaaatttaaactaataactaaaacaaaaattttctgttggacatcctttgtttcttgaatgtgattcagcaaataatgcatatgcacccattcccaaatttagaaaattgctgtccccagcaatacatgaaaaggattatgtgctgctaaatattcaatgatgtatgcattatttaagaatcacaactagaatgaacatcaatccaaacaaaacacacttaaaacagttaattcacaaaacagctaaactaaaacatactgagaataaaaaaaacaagaacaataaacaaatgaaatagtccttggttgtcactttgctgcaggatgcagcagcacttcctgcttgtcttcctcaatctcttcaccctgaaatgcagaaaaattccaaacatatacttgatgcagtggggtgaattcccagatttgatcctttagatgtagttcagatcaagtagactgtgcattagttaatagtattcaaaaataacagcacagttcacagcatgtttagaagcatttgggaaatcaatctgcccagaatttcgtagtgtgcctatgattcccagatttaaaatcgtgagaactctcaaaaacaaattaaacagtgcagtatcagtcatcagggttctcattaggcaatcagtgttctttatgcccttcaaaaacagttttcaattaaaatcttggttcaggataaccaagatttcactcagtaccaacaagatagcaaacagcaagtggacaattcattatatttacactaacaagcacagtccagctatccatttggttcagttacaagcagaagataagtcttaataattcccagatttgattcattagatgtactagaccagatataatgcaaacattttatgcagacaccacttcaagttcaccagtggccagtacaaactatgcacattatgacagagaattgaatagtctcacctggattcccagatttagcctagtgtgtggccttaagtcatgctggccacaagtcatatttaattcttggttataatgaaagcagacttcacaagttcaggcacaacacagacatatatgtgtacagctaaaatcgaatcaatgtgcctatgctttaatccaactcaaaccagttaatggattacagttcaaagccttgagtcttaaatttcccagcttacccttttctaggaaactgtttccagcatctcgcgcgatccgcgccgctagtcactgaagggctttttagctcgaacatttggcgcggttggcgccattgtctacgcggttagcgtgaaatgatgccgaagggggttctggttcgaacttctcgcgcaaaaacccgtgctactagcgtgaagaattggcttttaggcacgaattaatggcgcggtcagcgccacttgtcacctgattagcgtgagttgcccgcattgtggcgcggttagcaccgcacttggcgcgatccgcacggtgcctttgacagccctttgtctttctttttggattgctttttgtttatgtaactaaacctatattgactaaaattttaaatatgcatgaagatggtcctaatgctattaaatttaaaatagaacttaaaagcatgtatttacatcaaaagattgctcgtttaacgtcttaagctagacgcgtcctgctgtttaatcatttgtggatttatacggaatagaaacagtgtctccaatcacttggtctccaaggtaaagccttagccgacatttgttaactttaaaagtcctgcctttgtctaaagaagagatctcaactattccatgaggacaaatcttttgcaccaagaaaggaccagaccagaagaattctgacttacctggaaacttcaggcgatattttgagagcaatatctgttgtcctggctcaatttctttttggcgaattttgttacgccacttcttggtcttccctttacaggttcgagcattctcatctgcagctacatgtgtttttcctgcagtttggtatttcttttgtgcagcatccagctttttgttcgattgcttcttgggtgttgccacatcttctgctggattttcctttttctgcagtacctccagcacaagttcaatggtttctgatgtgttttcctggtctggaatactcaattctgcagcaatttctgctgcactattttctgcttctgctgtattttcttttgcattttctgctgcagctgtatctgctgtcatacctgcacaaacaacattatccagaaaatctaacctagaacaattatgtgtgtcagatggatctatcacagtattgaaaacattaaaaacaacagactcattatccatcctaagttccaattttccttgttctacatcaattaatgccctagcagttgctaaaaaggacctccctaacaacagagggatttcactttcaccctccatatctaacataataaagtctgcagggaaaatgaacttatctactttgaccaacacatcttctatgacccctgatggtttccttaaggaacagtctgctagttgcaaggaaactctagtaggttttaattaagttatgcctagggacttacacattgataatggcattaagtttatactagcccctaagtcacatagtgccctccctacatttatatttcctatggctatagggatattaaaacttccagggtctttcaatttctttggaagttttcttaaaatgatggcactgcactccttagtgagtgctattgtttcacagtcctttaacttatgtttcttagacagaagttccttcatgaattttgtataattaggcatattggctaatgcctcagcaaatgggatatttatatgtaacttcttaaacatgtctaagaacctggcaaactgctgctgctgaatttgttgcttggtctgcactggatatgggggtttctcaaagcgagagaaatcccacttcttctatggagatgcagaatttccatctttcttctcttttcctgcaggtttttcttcttctgcatcgtctgctgtattcttcttctcagcttctttattgcttacctcaggcttttctggtggagtgagcaccttaccactcctggtggttgatgtgttgcaaacacatcttagttttaggctagttttaggattgaatgtagttaaatgtgtaagaaaatagattagaataggttagtttattattaagtttgatttaatctcatttcattatcatatgtgcaaattcagggccaaacagaggagaatcaagcaaagaaaagagaaaagcaagttcaaagactcacgcggatcgcgccagatccggcgcgagtcgcgccaagtgaaaattaacaagcatcagattcgaataagccgcgcaatcagcgcgggacttcacgctagtagcgcaagatgctcgaaagccagccattcaactcgaagaagccacgtgaatcgcgccagggccacgctaacagcgtcacctattcgaagctccagcgcggatcgtgccacatcagcgctatcagtgccagaagtccagcatcaagccattcagctcgaagactccacgcgatcagcgtggagttcattcgaaaggccagcgtgatcagcgcgggacttcgcgcgggtcgcgccatggagattctgtttccttaattaattcatctgtttcgaattttggcactggtttaggctttgttactgtaattaaaccattctatagatacaaggcatctgggactgaagaaatacacacagatacacactgaatatcatctattatccagagaaactcatattccatcattctaaacctctggaattcaagaatcaaggctagggtttcagcataatcatgaattattcaacagcttttgtattcttgaggcctatgtcaagctaaactttatattgtgggaaggccatgaactgatgtgaactcctctgtaacttaactggtattgaatgagaatatcttgattgttttattttactctgttcttcactattttattcttattttggaattggccattctatttagatatttagagttaggattcgcaatgggaacgttggggttctaatttctgactttagtaaaataacaattattcattacctagggatagggatgcgtggctgcagaaccttatagtaaattcttttaattgcttaactcgatagaattcactaagggattaggttttcgattcaggttaaagggttaattcactaaggaattagggattaactagagtaggaaagatttattctctgaacaatcagaaataagcaaactgtttgatgtagtcttttatattcttaataggaatcactaaggaattaggattcttgttaaagggttaaattgctaagaaattaggatttacgaaaataggaaagatataccatttgagtaagcaaatgttgtaaccagttaagtgaaagaggtaggaatcaaaggggattgtgcctgaccacaattgtttcttccattggtaacactccgaattatttactgcatttcctgtatagtctgttttactttccaacactcaacacacaacatttcttcacgaataatttctttttatttccaattacattgactaaatattactatgaatttcaacccaatctctgtggagaacgatactttacttacccactttattacttgaaacaagcggtgcacttgccgtgttcgcaacagtggtgatagcattgacatgttcccttgggtttataactgtgtcactgggaaactgtccttgtggcctctcagaaatttacttcgccaattgaccaatttgaatttcaagattccggatggaggcatcttgatttctgtggtgagctctagtctcttggatgaaagcatttgttgcctgtatgtgctcagtggttgtttgtgacagctgcatcactaccttctcaagttcagaaatactagtggttggaatgggaagaggctgaataattactagacttatagtctaatcctcctccttgtgcattcctctggtagttgtttcccgcagcaaaattgttgtttctttgatatggctgctgctgcctctaatcattccacactccattaacttgcacaggatcagatccaacaagaataggacatacattagattcatgctcaccttggcagtactcacagataacacgtggtttgctggttgccacttatgctgcagagacttgtaatctatctattttctcagttgacttggccagctgttgggccaagattttctgctctgcaagcattgcatcattgctggacaactgaattggttctctctttggctgaatggttatactctcattttcattacgagccaaagaattaatcagctcatatgtttgagctacagttttcgaccttatagtaccccctgctgcaacattaacaatcatgcgtgattcaagaatcataccattaaagaaaatacgtacctgcttacccacaggcatgtcatattgtgggcatttcctgatcaattcttggaatctgttccaagcagcacatagggattcttttcgattctgagtaaagttggtgatttcatttaccaacctgttatatttgtccatggaaaagtattgggcaaagaatctcgagactaagtcttcccaagttgagatgctattggaagtttgtctatttagccatctcaatgcatttcctttaacagcaaaagggaataggcttagtcttactgcatcatctgaaaccccttggtgtctgatagtgtcacagattttgagaaatctgtcaatgaagtcatgtgggtcttcaaaatcctcccctccaaactgactacgttccaccaatgctattaatgaagggtttatgtcaaaatgattagcttggattggcggcctcacaatgctggagttgggtcttgtgaacatgggagccagaatgtcttccattagttcatcctccggtctccgctgattgtttctttcctcagccatctctacttctgactctaattcagggagtgaatcaaagtcaaagttttcagcttctctcctcctttgtctggctagtctccttcggatggttctttcaatttcaggatcgaactgtaaatcctcaaagttaactgaacctctcataaaactcagagaagcgattagtaacaaaaattccaattacaaagattaaaaattactgtaaaaatccgtttaccaatccccggcaacggcgcaaaaaaaacttgttgcgaaataagcgcacagcaagtgcactctcgtttcaagtaataaagtgggtaagtagagtatcgtctccacagggattggggtgaaattcacaataatattaagtctaagtgattggaagtaaaaagaaataaattgtgcagaattgttgtgtgttgtgtgttgaatataaaattgaaattaaaatgatacatctttccgattttaataaatcctaattccttagcaatttagtcctttaacaagaatcctaattcctcagcaattcctatcaagcatataaaagactatatcataaggttcgcttatgtctgattgttcacaaaataaatcttttctagtttagttaacccctaatcccttagcgaattaaccctttaacctgaatcgaaaacctaatcccttagtgaattctatcaagttaagcatttcaaagaatatattgtaaagttctgcagccatgcatccctatccctaggcaatgaacaactattattctaatcaggtcagaaattagaatcccaacatccctattgcgaatcctaactctcagcacttaattggagtgatcaatcccaaataagaataagacaaataagaacagaatagaataaaacaatcaaaacattctcattcaataccagtcaagttacagaggagtttacatcggttcttggccaaaccataatacagaatttagcctgacataggcttcaagaacaccaaagctgttgaaataaacattattctgcagtaatctagctttgattcttgacttccaatggtttccaagcccttgaatggcgtctaatggtgtccaatcgtgtttcttcagtcctagaggcattgtatttatagaatgatttaattacagtaacaaagcctaaaactttgcaaaatctcaaaacagatcattttaaatcaggcaagaaatcaattccacactgatggcgctgatagcgtggtatttcacactaatcgcgtgaagtccatgcaagtattgcttgatgctgagcttctggcgcgattcgcgcggatcctggcgctgttggcacggttcttgcggcctagtcacgctaattgagtgaacctccacgctgatagcgtggagtcttcgaaactgggccttcaatttttcctatggcgcgactcgcacggatcctggcgcgatccgcgtgagatcttgaatcttgttttcttccttcttttgctttgaacttcctctttttagacctgaaatcataacttggtgataaaatgagataaaatagaatcataataataaactaacttattctaacctatttcctaatgatttaattgaaatgtaacctaaaactaagatgtgtttgcaacacatcagttgtatttatagaagattttgaaaatgataagaatacttcaacacaaccaataggttggtgaattggttgaaccttgtccaattaaaatttaaaatcagagtattaccacaggatctttatcactttcaaaactatttcaaaactaagaatcaatattcaatcaaattccttttacaagaagaatagaaaacagagtataattttctgtgcaatgaaattgattcacaaacaaagcaattaagagatgaataggtgagaagaaagattagtctcagatttttatactggttcacttcaaaccctatgaggctacatccagttcttctactcaacactagagtagagttccactattgtaaaaatattcttacaagcaaatttacaagcctctcttcatcaaccctagatgaagttcagagatccaaaaccctattagatccttagagaccaaaacccacactgagaacactactcatctgtcttttagagaaacattatctcacacttgcaagaaactcaattacaatagaatgatccttacaaatattcaaagaacagtttacaccatcaaagaataaggaaagctatcacctgataatccaagaatgaatgcacaatgaatgattctcaggttgaaagacagattacaatcacatatgcagtcctttccttatgctttgaatgaatgaagcttcaccttcttgaatcaaaaacccatatgagatttttgtgaagctaagtatgtttagaactcagagaaactcactaatgaaagctcagaatgtttgtgaaagcccggaatatgaaaaatcaaaagttgcaaacttcagagaagtgagttctatttataacagatttttaactgaaaataatcgattaaacatgctcctgtaatcgattatttaccatttgtaatcgattaaatcaagactgtaatcgattaaaatgctcctaataatttctgggtttgggctatgaacaatataatcgattattccgtgaagtaatcgattaaaccagtcagtcatattttcctaaatgagcttagtaatcgattaatatgatatgtaatcgattaagacagtgagctgtgatttttctaagtctatatgcataggcttgtaatcgattaagatagagagttccatttttataaaaagccttagtaatcgattaaaccgatatgtaatcgattacaatgatcatgatttgttttctaaaggcatggagaacaaaataatcgattccagtatatgcgtaatcgattacttcagtaaaactttgttttaaccttttaaatgccttagttatatactgcctttgattaaaccttttaatctaatgatcctaaatgaatgattaatgcatgatgtgcacaattggattatcagatcatagacttccttttacaattaatcaaattggtcttcaatgctttccatggaactttgcctttgaccatgttgaaagcacaaaacttttgagcctttgattcttgttcattgatgcttggcttcacttgaatcaacaatgtccccctttttggctttaaacatgccaaatcctcaatttgattaagcacaattacttggagatcgaatgtcaaattccttgtttgaatatgtttttataatcctgagataatcaatatcttgccaagaaccaagtgttaaagtacacattgctcatgagtaattcaaataagcactataccaattgattagttttcatttaacacaattactccccctcaatcttagcatccattcaattcaaaatttttgccaaaaactgaataaaaaacagaggcaaacagaggtgtttgataccactccccttaatcaattctccctctatttgccatgttaaaagtcaaaaataatgtaagcacagcggattttaaactggaattgcatgactttattaataggatagcatatggggcagatacataatggaatttaagcactgaacataagagaaaatagaacataacatagttcattacaagaaagcagatcagacaaaatataaatctaatcaaaacaaaataaagtccattacacagagaaggcagatcagacataatctaaatctaatttatcctagaattctgcagaggcttgatcattcatattagcctcaatagcatccagcctttccctaatatcttctaaggctccatgagtttcaaccttgaagtcctcttgaagcttcagcattgtgtccatcttttgaataatttgtgattcaaaatcagagaaggcttgaggtgcaggctgtggttgttgttgttgtccctcatcctcagaatcagcaaccatctctccttgctcagcagcaccaatatgggaggccattacccagccttggggtgtcttcctcatgcccatcttagttagatgcttctccttaatttgactgttgtaggagagagtgttgtctacaacttcattttcaacatctatgttgaaatgatctatgagccttgaaacaaaaacaggataggggaaggggtaattaaccaaccttttggatttcagcatgatctcttcaaagatcaaagcccaattcatggggatatggttcttcaacccatataccaactaaagatcttcatcagtggcttgggcatggttggttgcccttggagtgatgatgtatgtgattaggtagtgcagcatcctatcttttgcagtcataggacctgtgccaagcctggtcttgagcctcatgtttgggtcatgaagcatgctcctgtaggtatccatcttactgtacccatcaggatcttcatcaaatctgcgagctcccacacagacaattcctcccaccgtttcccaaatttcaggggtgatgtgcatgactaccccttttaccttggacctcatatctccctgcatagaacccttcaagcaggtgtagaaaacttgaactagattagggtaaaaggtacccttcatctctagaaacctcctaaggctttgtgactctagataggctgggaattggaatcctttcctaataaaccagtcaagctctatgtatttggatgtggccacaggcttagtggcattgaactgaaggtagtttatcttatcagtctcaacagagaaccaaagatcaagcctatcaatgggttgttgttgaggttcaggttgaggttggggttgagaagaggattcaccgtgtctcctctttggtttcctaactcttttggaagtaggctcagacattatacagactagacacaagaaaagtgcagaaattgcagaggagagaaagagaattggtgcagtgattcaagaaatacaattcactatttataggcaagaattagagcataaatgtaacgcctctcttgactctctcgtgcttgattaattttagatgaaattcatgttcactttatgttataatgctcttggttataaacttttcacgaaaattcttttcactttgcttgctaatttttatgattcgtaagtagcgtaaacgattttccttaccacggttcatttataataagaatacagtccatgatacaatccaaagtcagttatcaaaataatacacagactgtctattacaaattacatgccatatgaaattacaaattacagcaaacagttcatcaaaacttcttcaacaaccttcatctacagctcatcctttcctgttcctctgctcgcccaaatgaattggggtcatcacaggtgtcaaccacagacacaaatcgggtaagtttatgacaaacatagtttgaataatatacacacagatagataaaatcttaatcataaaaagaccacacaacttatacagtgtacagatcatcatacatatacccattatgcgatgtataagatgcatgctcatctttttatatgatgcatgactgagatctcaggttatcattaaatcatcattagtggccacagtcaagatagccccatcccagtggcacacctatccattcagtcggggtagggcaggggcgcgtaggaatgtcacctccacctatgtgatcatcatggtggtgtggtcgtggtcctccctgaaacacactaccccccagttcaacacctctgaacacatggactcggtttagctatttgacaaacaactccacggattagcctccgctagggataactccacggattaacccccgccaggcatatgcgtatgaaatgcatgaatgattcattttatcaagtctttaaacatcttcacaactcatggcatataatttttagaacaactcataaagcttatttccaccatcataaaactttacaccacaatctcatcatacaaccatgattcaccacaactcttggaatccataaataatcaccatacaacacaaggattccaattattccattatcaacataacataattcttaattagtttcttaacatcaaaatctaatttatttttcaacatcaaaatcgtagaccatcaagcaacatgttaacgttgtgaaggtatatagaattactttaacaacacatgaaagatcacataacttattttatttctttgaaatcttttatcaaacacttggtgtgctttatggaaacactcaacaacacatgtaaaaacacatagttattcctttaaaacattcaatcatgcaagtatactacatatccaacaataaaggttcaaatccacaacacttaaacatcttttattcattgtgacaaactatcaaacacatggtgcacaatatagaatacttatttaaaagaaagctatataaacatggttcttcataaaattcaacacaaacacattctcatccaagttctaatgtcaaactaaatatatattcgtagaacaacttagaagaatttcagccaacattaaatttatagtaaaatttttccattaactaaccataattctaaacaactaatttatttaagataatcatactaccactaattttaggttacttcttactcttctttattaattttagttcaagttattcatccaaccattagttatttaatttagaatcaagttacttaatcaagtagtcattcaagctctttgagacatttcatcaaacacctagtctacaaagaaaaataaatcaaaaaaggattattattcaaactaagctcaacataaactccccataccttgttccctaagccttgtggacagcctttcttccttgaatttgaatagctcttgctcctaaaatggctagtgcttcacgtgaacttccaaggttttaggcttttgctttatgttttggtaaaaggtgaattagaaaagaatggaatgaaaggcattaggctagtgttttgcacggttttggactcccttggctgtccaattttcagctatcctcctccttttataggctagatgaattggcttttctaaaaaaaatcttcaaagcttatatgattacctagctttttggttgttttcattttattggctattgaactaaggccttacaagtgtcctatatcaagagaattctacaccattcctacttccacctagcttgcacattttgtggctggtccaaggtgcattccatttgctttctattcaaaaccgtgggtagcttagacttagttataaaaatttctgcccaaaatccgttacaaaaatatttattatgaacttgttaaccgttggatcttcttaaacttttaaaggcatacttctatcttacatatctaaattttgacagttgggatttttgaaataatacatagaactatctacaggtccaaaggagtcaagaggaaatgtatttagaaaaaaaatcttctttaagccatcattttttgctttccaaatggtccaattgtctttgcctttgctccttggccatccacatgtcctttttcttgagttttctaaagctttcttcacctttgcttgaagtgcacggccatatggagtttttgaagcaaacatgtgcaattttggtcttaaaccgtggagtagtcatagtttagggattttatgctttgttttacttaatataaattcttacatagaataaaattatttctaaaatctaggaaaatctaattccaattgttttcttaggagtaaaattctaaaattgtttagagactaattttaggtctttgtaacatgtctaataatataagcttttcctaaatagttgtatcttaatttctattgcttcatcttgtttgattagtaaaattactaacctagtttgttaaaagagtttatttgttttagaattacaagaaatctctaaagatcataactgttctttctgtataattttctggcacttaaaatatcctaaactgaagttctttctaaaatgattttcaaaatttatagaaatctcatcttatggatctttgttactttcttgatcaataattggttatctataagtattttattccatacttaggtttccacaaaatttccctacccatctgggcatttttgacctaaagggtattttggtaattttactactcactctaggggcaaaatcgtcattttcaaaaaatgttcaggatatctctgtaattgtcactctaagggtatctttggtcatttccaaaacatctaaggatatttataacatttcttccttaaaatgtcttactggacttcctaggacaatttagtcattaataaaatatctaggggttttttggtcatttatcgcctcagggacctaactgtcatttttgaaattgtccaaggatatttatgtcattttcaaaaattttccagggcaaatttttcattttcaccctagggacataagcgtcatttttgaaattgttcagggcatttctgtaattgttactctaagggtatttggggtgttacaataaacgtctatattttcaaaaaaatataaccgttgggaggatttaatggcattgggtgcagttatagcattgactgggctattaataaattcacgaactccagccagatttcagacaacagtacgaataatcgattatttcgttgtgtaatcgattattccagttcaattaggtttctgttaaacacgtggtaatcgattatttatataagtaatctattattttaaacgagatcagaggttgaagaagacttgtaatcgattcttttcatatgtaattggttattctagagcttttatcaattgaatcaagtatcatagccatatgtaatcgattatcccgagtggtaatcgattatcacagagtgagcattatttcaatataaatggtaatcgattacatcttataagtaatcgattattccagagagacgtgcttgaagttttgggattttgaacactttaatcgattatcccgatacgtaatcgattattccagaggaaagtgatttctggaaatgtgaagaataatcgattaccattggtgtgtaatcgattacatgattacaattttcgttccagacttgagttttaatgattttaatcgattaacccatggtgtaatcgattactatagagcattcatcatatacagagcattttagcagctttttgacaatgatacaaacacacaagcatttaaagacatataggctttcacaaatcatacaaaccataaacaaaacaagctagataatgttattctcatcaaggatccctagcatgtttctaagtgtataaaatctatcccttgaaagtggttttgtgaaaatataagttaattgatgattggtgtcaatgaagtctacctttatgttacctttttgaacttgatccctgaggaaatgatgccttatctcaatatgctttgttcttgagtgcattattggattctttgatatgttgatggcactagtattgtcacatagcagaggaatagcctttaattctactccatagtcaagcatttgctgtttaagccataagctttgagcacaatagcttccagctgagatgtattcagcttcagtagtggaaagtgctacacatgattgcttcttgcaatgccatgagatcaatgagcttcctagcatatgacaagtgccacttgtgcttttcctatctaatttgaaacctgcaaaatcagaatcagaataaccaatgatatttaaagaagcaccttttggataccaaagaccaactcttggtgtagctttgagatatttcagaattctcttgatagcagttaggtgtgattccttaggattggcttgatatctagcacacaaacaaacactgagcatgatgtcaggtctgctagctgtcaagtataacaatgatccaatcattcctctgtactctgactcatcaactttctttccactttcatctgtatcaagatacgttgatgtagccatgggagttgcatcatctttgctcttctccatctcaaatttcttgataatctcacgacagtacttggattggttgagaaaggttccattcttcatttgttttacttgaagtccaaggaagaatgtaagttcacccatcattgacatttcaaattctttctgcatagctgatgaaaaatccttgcataacttgtggttagtagaaccaaatataatatcatccacatatatttgaaccaataagaaatcattgccaagccttttgataaacaaggttttatcaaaattgccccttgtaaaagattgtttaagcagaaatttgcttaacctctcataccattgccttggagcttgtttcaaaccataaagtgcctttttcagtttgtaaacataatttggatgtttaaaatctttaaaaccaggaggttgttcaacatatatgtcctcctcaatgtatccatctaaaaatgcacttttaacatccatttgaaaaagtttgaaatccatgagacatgcatatgcaagtaataacctgattgcttccaatcttgcaactggaggaaaggtttcctcatagtcaatgccttcctcttggttatagcctttagctaccaatctagctttgttcctaactatgattccactttcatcaagcttatttctgaaaacccattttgtgccaatgggtttaagagatgaaggtctaggaactaattcccaaacttcattcctcttaaactgattaagctcttcatgcatggcatgcatccaatgctcatcattcaaggcttgatcaatgttcttaggctcaatttgagaaacaaaagccatatcacaacataggttttttaatgaggatctagtagatactccctttgaaacttcacctattatgttttcaagtgatagatctcttctccaatccttaggcattggtacaggagttgtggattctgtttcagttattggttcttcaagtttggttgagggattgcctatttgaattatttcttccagctgacctgcatcattatccaactctttttcctccttagagggattagtttcatcacaaattacatgtactgattcttcaatgcacattgttcttttattgaatactctatatgccttgctatttaatgagtatcctaggaaaattgcttcatctgccttagcatcaaattttccaagtgattctttcccattgtttagtacaaaacatttgctgccaaaaacttttaaatgagaaacattaggctttcttcctttgtatagctcataaggtgttttctttaaaataggccttataagtaatctattcaaagtataacatacagtgcttacaacatcaacccaaaaatacttaggtagatttgattcattaagaagtgttctagctccttgttgcgcgactcggcaaaacacggcaagtgcatcgatcgtttccaagtaataaagattaggtaagtgagtatcattctccacagggattggggtgatttcacagcaatactaacgaatgtgattaaaattaaaacaggaatacgcagagaaaagtgtttgttgattggattggttgttttgaatgtaaagacagaaattaaagaaatacagtaaattgatattgaagattactaatggaagaataattgtggtcaagcacactcccctctgattcctcctctttcacttgactggtttattaactttaacgtacacacatgataaacctctcctaaattcataaaccctagataactagcgattcaaccctttaattcgatcgagaaccctaagcccttagcgattctgtcaaactaagcatttagagaatatatcatatgggttcctgttatgattgttcagagaataagccttccctagattagttaatccctaattccttagtgaaccaaccctttaacctgaattgaaaacctaattccttagtgaattctatcagtttaagcatttaaaagatcatattataaagtctgcatttacgcatccctatccctaggtgatgaacaaatgttattcctaataggtcagaaattagaaccccaacgttccctttgcgaatcctaaccctaagtacttaattgaagtgatcaattccaaataagaatatgaaagaagaatagaaaagaataaaacaatcaaaacatatgtatttctataccagtcaaattacagaggagttctcatcagttcatggcctttcaacaatacaagaattagcccgccataggcctcaaaaacatcaaagcagtagaagaattcatagtgatgcagaaaccctagccttgattcttgaattccagaggttttgaggattagaagaatgtaaaatatggtattagatgatgatagatgatattctggatgcctctcttcagtctccctaggcctttatttatagaatcatttaattaaggtaacaaggcataagctgtgctcaaattcgaagcatataaagttaaaacaagcaacaaaatcttcatggcgctaaccgcgcgggtctttcgaatccacggcgctgatcgcgcggacatccacgctaaccgcgtggatcattcgagctggatggcttgatgctgagattcctggcgctgacggcgcggatttggcacgacccgcgcggggtcctcgaatagatggcgcggacctggcgctagtggcgtgagttgttcgagctggggaagctggcctttcttgatctggcgcggagtctggcgcgactagcgcggcttgttcgaatctgaggcctgttgatttgcaggtggcgcgatccgcgcaggactttgaatcttgttttcttctttctttggcctttattctcctcttttaaatctgaaactattcaaatggtaatgaattgaattgaaagcagataaaatgataaactaactaatttctaatctattttcctaattatttaaccgaattatatcctaaactaacttaaaactaggatgtgtttgcaacacatcaaacaattcccagatttgaaagttgttgtccccaacaatagaaagaatttaagaccaagcaagaatcaacaatcaagcacaaaccacaggatacaatcctagaatcatcatgctatgtatgatcaaattcacatcaaagcttccatggcactttcaatgctgtcatcaatgagagcaacttgagtgttcctcacaagattgtgtttaatcactcattcactcaagtgtatcaggctatacttactcacttactcaacaaaatcacagcactaccataagcttgaagatattctcgacagttgcaaatgcgacttgatcaaaaggtcttttcggcttgtaacgtggctgggctaagggtaggaaatcatttggaaacgtagcttaataaaaggctagatccagtcccttaagtccacaacatgctccttgtcgtctttttccaaaacctggtactttattcaaccatttattctaaagtaaaagcggaataataaactttttttttgattttggaatttttttaaacaattaacagtaaacataacaaaattcaaaattactgtagcttctcaaattcttatttgatggacttattgttttccactttggctcatgcttgtttcttcttgttcttcacaaccaattggattcacttgtgtttccctatttttctgttgtcaaggacttaaattaaactttttctagcctcaggggttggtcaattggatgtggctctgatgtgggcaactgaaataaaaggtttaggctcaaatcgaggtgcaaattggaaaaatacttgaaggtgagtcaatttggccctagtttcagaagaaaaatatgccttaatcatatcaagtcacacctgcatccagagaaacgattcaagttctagagtacaatgaaattggagtctcttggaaagaaaacattaccgctgtttggctcaaatccttataggtgttcaactcgagtcacttttagctgactgcatttcaagcatcatttcaacttcaacatgcatttctcatacaaataatcaaattccattcatgcatcatgcagtccatgctatgtttcatttcatcaagcttccatcaagaattccatccatcactgtgttcattaactttttgattctgaaaaatttgatatgctgcttatttctgaaaaaaattttgaaaaattctgctagacgtcatctgttattttgattgtgatttgcgaaataatgcataacaattcccagatttatatgttgctgtccccagcaaccacaaataaggtcacggtgccttggaaaaatgaagcattatttggaaaatcgcattcaactcaacattgatctaaacagtttttattgcaaaatataaacagaactgtgtgatatatatataaatgaagtaatgtaaagtgtgcagagtgtaatgtcaatgtgaaaatgcagaatccaaaataaacataaaaccagaaaacataaacagaaattaaaacgaaaatcctgatcactcctctcctctctctacaatctctgcagcctctgatgtctgaggtggctcaggaatggatggctctgtagctgctgcatcggaaggaatcggagtagtctcggtggctggagtagtagctgctggtgtaggtgatgtaatctggtactcagctggtggaatgcctagatgtctacagatggctcctagcatgctagtctgctgagctaactgggttcgtacgaactcctggaaagccagataagtgggggaatctgtgaaaagtggcttatggctaggagtaggggctgagactggtggctatggtgcatccactggtggtgctggtatctctgctagctggggaatctctggtgctggcaagtctctgggactgtgggtggcgagctcctcaggtttgagcttagaagctcggagaacctgctcatcagctgcggctgccatggcgtccaagtaagtcttgtggctcatcagcgaggagatctggacgtccataggctcgtcatcatctatgtgcacacccacgtgccggcataagtgtaggatgagggaggggtgtgccagccaagacttattgctagcgtcctgtatcatgtgtagaatacggttagagagaaggttataaataagaagattaccctcacctcgcagggtataaagtagaatcgccctctcgacgttcacatccgtcatattcgtagaaggtatgacggtttgattcacaaattgatgccagaaagcggcatctcccaccaaatcgtgcttccgcatcttctctggtatgtaatccagcccagatttgggcttccaagcagtgaagaggccagtgatggccctgcggatggtggtagcgagctggggaatgtcgtcccggtacatcttcgtcaacgcatctggctgcatccgaaggaaaagctggaggaattcgcattcctcgaaggggtcatagtgggtgtccaacatctgctctatggctttgtcatcaaaaaggacctggacacccctcacccaagatctcctggtcctgtagacggtatctggatcaacgtttgccaaaaactccttcaatatcatgctgaagctaggctctggaaaagtaacaagtctctgccactggcgtctcaggatcactgctctcactgggttatcttcaggtagcgtgtcccacaagattttcttctctgaaataatcttctttggtaggtaccacgtgtcaaacttctcttggcactcaactgtgcggaagcgaagctcgtcatagtctaatactcgggctctctttcttcctccttctgcggtggccttcttcttaccctttgctatttgttttccctgaaaatcagaagagaatccaacatatagatatatattccagtcagttttattcccagatttattaccttcaatggctaatcagtttaggtacctgcagtggtaattatatgcacataaaagcaaaaggtaccataaacaagtatatcacaacttgggattcccagatttaaggttctcatatccaccaataatcaaattttcagcattttatgcaatgatgttcctaaagcatttggtcctaataatcacagacacagatcaagcaaaataggttcatccttcaaatcagctcagttcactgtttcttattcaatttcagtccaggaacaattcccagatttaattctattccatacccacagtcaacaaaatgatggatgagtgtcaattttgaatgcaatttaatcatagcactgtagttgttttcaagtaattgatcataagcatgtttctttatcaattcaagttgatttagttcttagcaatcacaggttcttgattcccagattagtcttagcacaagtttctaaaatattaacttttcattacaagtgcatcatagacacaattcaacactcaaacatatacaacaaatcagtttccctattttggttcaaaggttgtgccatgcctatgcattcccagattttgggcgtgtctatatgctaattcgggcccttttcaaatcatctaagtccaagtggcagaacagagaaggacatcaaggaattgatgcaatggctttaccacaatttggttcattcatcattcaacatttccacttatcatactcatttaacacaattcatatcagcagtggacaatccaaatgactatgttcagttaccatggaaagttcatccaatttttattaccacacccacttagacacaatttagttgtcatcattcttcatcatattagtcatggaattagacaatgcatatttcacatgcataatttcaactcaaactatgacaatgcctaatgtacccagttaatccacaaagtaattatatattcatttcacaattcaattcttgaaatcatttatgcataccaaaagatctatgattatagccccatcatcaacaaaaaccatggccttactaaagtgagtaaaccacaccaaaattatatatcaatcacgtcgtttgcactatttgtttttgtgggtttcaaccaaagtcatcaatgtaagcacatatttcagatcaaaccattgcaataaaccttattcatatcatagcattacatctaattaaggctttatgcaaattgaatcaatttggccataattcctttcaatttctctctcaggcatttaaacaaacatgtactgggtatgtaatcaattcaatcacattatacctatttggatcatatcactatccaaatttttaacataattaatagcaatgagcaaaagatcaaaagcatttcgaaaatcacccaaattggcattcaagcacaaaagcattatcaaacaacaaagtttctaccctaaggttttgacactttttggaaatagctctaaactaccagcattggatacacattacaagtaggttaagtctagagcattaccttatcaccagccatacttggaaacctttggtgcagaatgaaatgatattgagagaaaggtgagtgagagaatccgagagtgtaacagagagtgaatgggagggagagaatgcttgggtgaggctctttaaagagagaagggaggttaatagtggttaatggtggtgctggggtctgggcgaaaatggcagagaagtttgtggggagtgggaaacgaagcgcggaaaggaaaatttaaaataaaaactgattccgcgacgcctcgcggttagcgcgaatgcaggcgcgactcgcaccatggtgcactggaagggttttggtttcgaatcatccgcgcgaatggcacagggtttcacgcgatccgcgtgaattggcaatgaaaggacccttttcctcgaatgactggcgctatttgcgccactgtcacgcggttagcgtgaaattatggagatgtaggtctgaggctcgattaactcgcgccactcgcgtgggattcacgcgattcgcgtggctaagtcgagactatggcgccagtagcgctgtacttggcgcgggtcacgccattttatgcagatgaaggaacttagctcgagcaggccacacggttggtgccactttctcgcgattagcgtagatggatcgagtgcttggcgctggtcgcgctgatcttggcgcgagtcgcgccacattttttgcacagcctttgctttttatttggattttgattttattgacttaaatcaaatactacctaaactaattaaaaacatatataatgatagacctaaactaacaaaattggaaataatttagatgtttaattaccaatgcatgtgcctaaattaaccactaaagaatatgcagaagaagaggactactgtagaatgctgattgcaatgttaaactaaatctaaattattatatacattaccagtagctcgtttaacgtcttaagctagacgcttgctctcatttaaactttagtgtcattgagtgaacagaagctgaatttctgtccacatcacctccaaaataatgtttcaaacgataaccattcaccttaaaagctcggtcattatccaaaggtgagattgccactgtgccataaggatagacttctcgtaccaggaatggtccagaccaacgtgatttcaacttacctggaaaaagtcgcaggcgaaagttatataacaacatttgttggccaggaacaaactcctttggacgaatttggttgtcatgccacttctttgtcttttccttgtagattcgggcattctcgtaagaagctaacctgaactcatctaattcgttcaactgaagcaaccgcttttcattagctttgtttagttcttaatttagaaacttggttgcccagatggctttatgttcaagttcaatagggagatggcaagccttaccatagacaagctgaaagggagacatacctattggagtcttaaatgcagtcctgtatgcccacaacgcatcatctagcttcttagaccagtcctttcttgatgttccaacagttttctcaagtattcgcttcaattcacggttggaaatctcaacttggccacttgtctgagggtggtatggggttgccactttgtgcttaactccatactttgctaacaagctgtcaaattgcttattgcagaagtgagttcctccatcacttatgatggctcttggcactccaaatcttgtgaatatgttctttctcaagaatgagaccaccaccttggcatcattggtgggtaaagcagctgcctcaacccacttggacacataatctacagcaaccaagatgtattggttggagaatgacttagggaaaggtcccatgaagtctatgccccacacatcaaacagctcaacctcttggatgttgttgagtggcatctcgtctctgcgagaaacatttcctgtcctttgacagctatcacactgcatcacaaagttcttagaatccttgaataatgttggccagtagtagccacattgcagcactttgtgtgcagttctatttgctccaaaatgtcctccataattagaggaatgacagtgccacagaatatccggcacatcactttcagctatgcatctgcggataacattgtcagtgcattgaaaatataaataagggttatcccagaaataccttcttgcatcatgcagaaatttcttcctctgctgccaatttagatcttcaggaatgattttagcagctttgtagttggccatgctagcaaaccatggactaatttgtacagctagcacttgctcatcaggaaaggattcattgatttcaacttccggtccatcttgcaagcctttttcctgaatcctagacaagtggtctgcaactttgttttcgactcccaccttgactcttatttccaagtcgaattcctgcaacaataacatccaacgcagcaagcatggttttgcatcttacttgtgcagcagaaattttagggctgcatggtcagtgtaaacaattacttttgaccctactaagtatgatctaaacttatcaacggcatatacaacagctagcatctctttttcagttgtggcatagtttacttgtgcctcttttaagattttactagcatagtaaattacatgcaagcgtttttctttccgctgtcctaaaactgcacatactgcataatcactagtatcacacattaattcaaaaggcaaactccaatccggagcaattaaaacaggtgcagtgatgagtttttgctttaaagtgttgaatgcttcaaggcaagcatcatcaaatgtgaactcagtgtctttctccagcagttggcttaatggctttgagattttggagaaatccttgatgaatcttcggtaaaaacctgcatgtcctaaaaagctgcgaacaccgctcacattaataggaggaggtaatttctcaatcaataaaagcttagctctatcgacctcaattcccatttcagatattttatggcctagtactataccctccctcaccatgaaatgtcatttttcccagttcaaaaccaaattagtctcttgacatcttttaagaacttttgctagattagttaaacatgaattaaagcaagggccaaaaatagaaaaatcatccataaatacctcgagccctctttctaccatgtcagagaaaattgaaagcatgcatctctggaaggttgcaggtgcattacacaacccaaatggcattctcctgtaagcaaacaccccaaatggacatgtgaaggcggtcttctcttggtcttccggtgccactgggatttggttatacccagagtaaccatccaggaagtagtaataatcatgaccagccaaacgttcaagcatttggtccatgaatgtaagtggaaaatgatcttttctagttgcattgttaagccttcggtaatcaacacacattctccagccagtgatagtccttgagggaatcaagtcattgttgccattttgaatgaccgtcatacctcccttctttggaacaatttgtactgggcttacccaaggtgtgtctgatattggatatatcattcctgcatccaaaagcttaacaacttcttttcttaccacttctttcattacggggttgagccttctttgtggctgtcatacaggtttaacgtcagtttccattaaaatttcatgagtacaaaaggaaggatttatacctttgaggtctgaaattgaccagcctatggctgacttatgctccttaagtaccttaagcaattttacctcttcatgccaatctagccctctgttgattatgactggatatgtttcattcttacctaggaacacatatttcaagtgttcaggcagttccttcaattctactttaggtgctccagttgggatatcatcttccttcatctctagtttctctagcaccggttctgctgaattttctgcagctacatgattaaattctgcagtagatattgctgttgcacttgctgtctctgttgctgcataatttcctgcacagtctgcatgtatagctgctgcagtttcttcttcttctgcatatttttctgcataatctgttgctgcagcaatttttgcttgaaccttagtttaagttgtttttaaatctgctataatacctgcacaaataacattatcaaacacatctagcctaaaacaatcatgttcatcagctggatgtttcatagcatcaaatacactaaatacaacagactcatcattcaatcttagttcaagctttccctactctacatctattaaggctctcgcagtggctagaaaagaccttcctaatagtagagagatttcactttcaccctccatgtctagcacaataaagtcagcagggaatataaatttgtctacctttactagaacatcctcaatcacccctgagggtgttcttagagatctatctgctaactgtaaggatactctagttggtttaagttcagatatgcctagggacttacacatagataatgacattaaatttatactagcccctaaatcacaaagtgctttccctacattaatgtttcctatggctatagggatattaaaacttccaggatctttcaatttgggtggaagcttcctttgaattattgcactgcactcctcagtgagtgctatggtttcacaatcttgcagcttatgcttcttagatagaagttctttcatgaattttgcatagttaggcatattagctaatgcctaagcaaatggtatattaatgtgtaacttcttaaacatgtctaagaacctggcaaattgttgcttctgcacttgttgcttggtttgcaccggatatgggggcttctcaaagcaagaaaagtcccacttctttggttgaggtgcagaattctgttcttcaaaattttctgcagctttttcttttggtgtttcagctgctgcagaatttttctcagcttccttcttgcttgcttcaggcctttctggtgtagttaataccttaccacttctagttgtgatggccttggcatgttcccttgggtttacaactgtatcacttgggaatggccttgtggtgaaacgaccgcttctacttcgtatttatttcttatttattttataaaattacgtgttttttttccgaaaaaatacaagaagaatgagggttcgaataatttcttcattaattttaaaaacgataaaaaaaaccataaaaaaaatatttgaaaatgatttatcaatataaacgttaacgcgttatctaaattacgtagtttaaatcattcacacatacttgccatacaaaccattattaccagtttatagcttgatgtctaaatagtccaaacagtccatacagtccataatacagagcatagtagaaaacatgcaaacagagagttatcacaacagtcttcaccaaatcttcttgtacaacttccatttcactgttcctctgctcacccaaataattggggtcatcacaggtgtcaaccacaagacacaaaatagggtaagtcatgataaacaaaatttaaatacaaccaaaatattagatacagaaatttagacttacgtactaattaaataaaatacagaaaacatatgcgaatcattattactatatttttttttcacccataaattaaataatttcttttctacttacagcacataaaaaatgcatgctcatcaaaacttccctataccttaaatacttttcaaagtttggaccagctgctcctttgctaccaacttcacgtggccttgctctttttccttgaagaatgtttgtgaaaatgatggcttaagggaggcaagtgtgtacggtttagtgtgtgatgtgtgggagctcaaaaacttgaagacaatactcaaaggtggtggggctaaaaactgcacggttatttctcttagtggctgtccaaaatttttcatccttttccttatatagcatgatcccataatcgcttgaatcctattggttaagagcttgactctcttggtccacaaaatgcttggctgcacggtttggatattttggaggaggaagccaatttgaattttgcttccttgcattaattgttgattccatatgtcttgaaaaaatctgcagccttgaccacttgttagtcttctctttttcctttgaattggcccacttaatccttgcttcttggctactacacgtgagcttctctcatgcaacatccattcagattttttcttcctttatccgtagccaccttgtcccaataatacatgttgtgctttctttttttcttcccaccgtggccattcttttagtgccatataacttgttttttttgtttcctaattgattagcttagtctctaattaatttagttgcatagaaattttatggataactccatccttccccttcatttttgatcatacggtttggcctagcttcaacaatccatcctacatttgttttctttttaaatagcataattgtattacttgttggttttaatttatagcctcactaatccatcttaataaataaatttctttaccttataattacaagaaaactcctaaggttatgtttatcacttttataaaattttctaataactaaaatagctcaagttgaattttattttaaaatgtgtattacctctagatagtgaattataattttctaatcatccttaactatttctttaaatccatattcaataaataaaatattggggtgtttaccacttctagttgtgatggccttggcatgttcccttgggtttacaactgtatcacttgggaatggccttgtggtctcttgttgtgtgatttgtataaatacggcaagtgcatcgatcgtttaacaagtaataaagtaggtaagcgagttatcgtctccacagggattggaatgattttgcagtaattaaaacaattgtgattgaaacagagaacagaaaattataaagaagttgttgaatgattgtgttgattgaaaatgaaaattaaacaaaacagtaaatttagacttgaaagattaccaatgagaattaattgtggtcaggcacaatcccttataagcattacctcttcacttgattgattcttttacttgaagtttacataagataaatctctcctaatattgtaaatactagataactagtaatttcgccctttaatttgatcgagaaccctaaccttctagcgattctgtcaaactaagaattcagagaacaaatcctatgggttcgtgttatgtttattcggagaataaatcttttctattttagttaatccctaatgtcttagtgaattaaccctttaaactgagttcataacctaatgtcttagtgaaattagtcagttcaagcaattaaagaacatattatagcctccgcactcatgcatccctatgtctaggtgaagaacaagtgttattcttaacaggtcagatattacacccccaacgtgtccattgtgaattgcaactctcaatacttatctagagtgatcaattctaaacaagataactataagcacagaaaagaattaaataaacaaaacatatgcattcaataccagtcaaattacagaggataactcataagttcatggcctttccacaacagaagattagcctgccataggcttcaagaacaccaaagcaattggatgaaacattgttatgcagaactttgtctcaaattcctgattcctagggttttcaatatttctcaaaggcttttcctatgtcaaagactgtgtatctgatgattcccccatcccccattcctgctctgaggcttcatatttatagccatgtttaataaaggcaagaaaaccaaaagataattctaatttcgaagttaatcaattaaaactggaaacaaaatccactccacgctatcagcgcgcgactccacgctcatagcgtggacctttcgaaagcacggcgctactagcgcgagtcctcatgctagtagcgtgagttggtcgagtcttcaggctgattccaggcttctttcacgctattagcgtggatgtcacgccagtagcgtgagttcttcgagtcaattgccttgatttcgtcttcttcacgctattagcgtgagtttccacgctaatagcgtggatctttcgagtcttcaacctcctttgccctttatttggcgctgatggcgtgaatacccacgctgatagcgtgggccttcaatcttggttttctctttttacttgagttttcctccttttaacctgtaaaatgctcaaatggtcttgaaattaattcaaagtaataaaaaggctaaactaacctaattccatcctatttcctacatatttaattaaaatctaacttaaaaactatactaaaaactagatgtgtttgcaacacatcaaacaattcccagatttgaaagttgctgtcctcagcaacagagaaatttctaagtcttaaacaagaattaacaatcaaacataaaacacaagttacaagtctaaagttatcatgaagtgtatgatcaattcagtcaaaaacatctatgatgctttcaatgctgttaaaataagaaatcacttgagtattcccctcagatatgtgttccatcactcattcgctaaaagtgtatcaggttataattaccctctttactcaacataatcacagcattaccataggcttgaagatattctcaataattgtaagcatgacttgattaaaaggtctttaaggcttgtaacgtggctgggctaagggtaagaattatttgggaaaagtagctcattcagaggctagttccagttccttaagtccaagcttattgtggtcttccaagctctttgtcttctctttttcaaactggtacttttattcaaactcttttattctaagcataaacataatactaactttctttttgatttttcagattttcttatcacatatttgcaattaaaacataatagatattgcagcttctcaaatttttcagctgatggattcatggttcttcttctcattcatttgatttctcttattgtccttcattccttggtaactaacaccttgctgtcatagacttatctcaccttctctagcctcaaaaggtttagtcgtatggatatggcttgattcggttgttgaaatgaaaatttaggctcaaaattcgggttcaaaggaaaaattttctatggtaagtcaatttggccctggtttttatagaaaaattgtgccttaatcatttcaagtcacacctgcatttagagaaacaatccaagttctagaatactatgaaatatggagtctctcggaagaaattttaccgtgtttggcccaaaccttacaagtgttgtaactcaagtcattctcaatcaactgcatatctggcatcattccaacattcaacatgagtctcacataccatcaatcaaactctactcatgcattatgcagtccatgtatcttatttcatcaagcttaatccagagaaatctgtccatcattaagttcattcgctttcttaatctgaaaaatttttgtgtgctgcttattttatcaaagaaaatttgaaaaagttccgttagatgtcatctgtttctttgattgtgatttgcaaaataatgcgtaacgaccattcccagatttatacgttgctgtcccagcaacctacaaacaaggtaacggtgctttgaaaaaattgaagcattatttggaaaatcgcactcaattacacattgatctaacgattatttatgcacaagaaaaatcgaataactgtactatatatatgaacgcataactgtaaagtgtatgtaaatgtaaatatgcagaatcaaatgtatgcagaatatgcagaaactgaatccaactaaaatccataagtaaaactaaaactggaaaataaaataaaacataaaacataaaatcgagtcctgatttctatgccctatctctgtttgtaacagtagcatcagcctctgtaggcccaatgatcactggctggatatcagtggtgccaacagtctcagagatatccaatggatcggtggctgcatggtctgctggtggagtaggaacagctgtctgatactctgatggatggatacctaagtgtgtgcacactgcctcccacatgcgtgtctgctgagctaattggttgctctggaactccagctgagttctaacaaactcctgaaaggcaatgaggctaggtgagtcctcatatagaggtgtgtgcgcaggagcggtagtaaaaggtgctgtatcgactggaggtggtggtggcatctctggttgttgagctggaagtggatcctgaggaggtggaatgtctctgggtgaacgagcagctatctcctcagtgatcgcagccgtacgcaaccaaattaaattgatttgaatgtagtactaggaagttgattcctaggtcgtctctcaaggatcaattgtcaatgtttaaggattgaaaacgtgttgggggggtttttgatagaattgggcagaaattaaatttgaaattaaaacagaaataattagaaacgaattgcagtaattaaaaacgaattgcaataattaaaaacaagtcaaaccctagaacagattgcacctccaatttccctgattcacgaaagatgatctgttccgcttaattcttatcagtccaggttaatcaactaagcgaagattaacctaaaacgtcaattcacgaattaagcaaacgtgaatctcgttaaggcaatttctcagaattaagcaaactgagattaacaactcagaatcattaagcatgaaacgaattgcatacagaaccctaacaagaacaaatcaagcagaaccgaaattcaacacagaaacctccattaaaggtctgcaatctgcttagggttcaactctagggtttagccttccattaaattgaaattaacaacaaaaacgaattgtgcattgaaactgaacatatcgaaaccttaaatagcagtaaacgaaaatggaacagaaaacgaaattcaactcaacagaaaacgaaaatgaaaatagatgaagcagaatagaattcgaaaagaatagatagaacagaaaacgaaaattgcttctaaatataaaatctcaacgaaagtagaaacagcaggaaacgaaaaattagaaaaataaagaagaaagcagaaaacgaaaataaacctaaaacctaaaaacgaaaatggtctgtagaatgtagagtgtgtagagtctcttctgtctgtgacggcataagctaaatatatagaaactgctaacctagacgaatgggctaaccctaacaattttggcccagaaaataactaaaataataaaaatgaaattaattaaaaacgaaattaaatatggcgtggcgcactaatcttcagtccataaattaactccaagcccaattaattgttaaactgccctgaaaataaaaattagaataattaaacttaaaataatccaaattaattaaaatccgaattatcggtccaattaaatcctaaataagaaacagtgcaaaatatagacatttaaacacaactagggattaaaatgagtacagaaaaataagtaaatagtaataaataatgactcatcactcaggtttgagcttagaagctcgaagaatttgctcgttggcagctgaagccatggcgtctaagtatgtctggtgtaacatgatggtggagattggaacatccataggctcctcctcatctatatagacgcccgcttgccggcataggtgtagaatcaaagatgagtgccctaaccaggacttgctgctagcatcctgaatcatatgcacaatcctgtcagataaaacattagaaatgaggagatttccctcacctcgaagtgtgtataaaagtatggctcgctccacgttcacatcggacatgttggtagagggaatgaccgtgtgattcacaaactggtgccaaaatacagcgtcgcccactaaatcgtgtctccgcatcttctccggaatgtaatccagcccagacttgggcttccatgaggtatagagtccggtaatagccctgcgcatggtagtagcgagctcgggaacctcgtccctgtacatcttcgtcaatgcatcaggttgcatacaaaggaaaagctgaaagaatgtacattcgtcgaaaggatcataggctgtgcccaggaaacgctctatagccttaccatcaaatgacacctggacacccctcacccatgacatacgggtcctgtaaactgagtcgaggtcgacgtttgccaagaactccttaagaatcatgctggagctcggctctgcaaaagtaactaaacgctgccactagcgtctgatgataacttctctaatcgggttcccttcaggtagtgtctcccacataattttcttttccttaattattctcttcgggaggtaccaagaatcaaatttctcttggcactctgctgttctgaatctgccttcatcatagtctgtaactcgggctctcttcctgctgccctctcctgtagtaatggttttcttcttgcctttagcaacctgtttgccctgaaatttagaatggaattcatatatatatatatatatcagcacacaattcccagatttgatgttttacatgtatcagataaattacactcaacgcatggctctataactggacataccaaattcatatcacaattatcttaacccgatgcccaaccattcccagattttgggtccaaacatattctgaattgactggttttaagtttagaacatatgcagtctgaatttcaatacactctactcaacattaatggcaattactcgctcaaaactgtcaaaatcaacattaaataattttcaagcagcaatggttcatatattatcagtacaaattagtccaattgatgtccttcaattcattgggattcctagattcaaaccaaagtttgtgtgcagtaccaatgtttaggcatcatatagtgagagtgacatgtaagcatagcctaatgataatgcaaataatcacaaagctcaacacagaaaattctacttatatctcgaggctatttgcaattatttcaattcagtgtgtttacaagtaacagatggggcttaatgattcctagttaacaacacacaatcaaaccataatatggacattcaattcagagtggttcaagataaaagccatatgcacttatatttaaaaatactcagactctgcaaatttcagttcagacttccatcatttgtgcatagtagagaaatttgacacccttcaccatgatgtaatttaaccacagaacatagccatgatccttttaatcaattacaccgaattcatgcaacaattgtcttatccctataccccaaatcatgcccggatttttgaatctcacttatattgtaactattattctagtcatagcagacaagcatttcatcctcaaatatataagtcatacatcatagggcacaccttgaatcagaaccacaaagcaattattatacttgacccaattaatttttaatggttcatggtcaccgaggtggcaatcaatacagtgtgtgcaagtgacctaaggtattcccattcccaaatttttatctagagtacaaactggattaatggtttacttggtgtaaagcaaatgtaatcatgacttactgtgtaaagggaatgaattttatttaagcaatcatgcagtaacatcaacaaaggtatatgatttctcaatttgttcactcaattcctcatgtacagcgtaatcaagtatgtcatacccaataattgcttccaatgcataatgtttgttccttacaatctcacaccatggatttagaagcataacatctcacaacactatcttatatgcatatttattcaactaatgcatttgaattgcagtcacattatagttttacaattattcaaagatttgagtcatatgtgtatcttcaatcatttccatgctcaaataggttcaatttgtcattcaggcattttagcaaacatgtggtgtgcatacgtgtaaatcattataatgtgcatgttgggtatatggtaaactcaaaatttttaacttttatcagaaccacagacaaagagaagaagaagaagcaattagattcatcaaatcatatttcaaatttgattctctatcctaaggttcatagtcattcattagcaaggactcaagcatttgagcattgatttcataattcctacttgattctattgttcattattaagcatagagatgtaaagacttaccttatcgcttgccatagtcaaaatcaagcttgtgaatccgtatgaagaacgaatgacaggaaaatgcaagtgaatagagggtttaaatctacgaattttggggagttattagcagttatgtgggttaatgagggtgcaggaggttgggcgaaaatgacggagaggttttgggagatgaagaggttgaggcgcgataggaagcttttcaattttaaaaacagttttcgcgacctcactctattagcgtgggtgtcgacgctaatagcgcgagtgacccctggagacccttaaagtctcgaataatcgacgctaacagcgcggggttccacgccattagcgtggaaagaaaaaaaaattggttttggctcgaaatagtgacgctaatggcgtctattccacgctattagcgtggagcttcttagttgcctcgaacaagcgacgctaatagcgtcactattcacgcagttcgcgtgaattcatgcagaaacaggtctgaggctcgaatatctcgcgccaatagcgttgtgtccacgcggatagcgtggattgatcgaatggaccgcgctgttagcgcggactctggcgcgagtagcgccaatccttctgcacagttttcaattttaaggctttaatttcctgtgcttggatttaatagttgcctaatggatgcttgtatgttttaacatgaacaattctatcattacatgcatgaacctaagtattactatgacttaatgcggtaaaactaataatgttaattcctaaatctaaggctcatggtgaaaaacagcaatttaaactaagtagctatatacattaccagtgtgctcgtttaacgtcttaagctagacgcttgctgcagcttaatcctcattagcttttagtggtacagaacttgaatttctgtccacttcacctccaaagtagtgttttagtcgataaccatttaccttaaagatcttgtcattgtttagagctgagattgctatcgtgccatatggaaagacttctcggaccatgaatggtccagaccactgggacttcaatttacctggaaacaacttcaggcgggaattataaagtagcacttgttgaccgggcacaaactccttatgcctaatttgattgtcatgccacttcttagtcttctctttatatatccttgcattttcatacgcggctaacctgaactcatccaattcatttaactgaagcaaccgtttctcattagcttttgttagttcaaaattcaagaacttggttgcccacattgctttatgttcaagttcaagaggtaaatgacaagccttaccatataggagttggaagggagacataccaattggagtcttaaatgcagttctgtatgcccacaaagcatcgtccaacttcttggactagtccttcctcgatgttccaactgttttctctaagattcgcttcagctcccgattggaaatctcgacttggccactggtttgagggtggtatggggttgctactttgtgcttcactccatatttagataacaagctttcaagttacttgttgcataaatgagttccaccatcacttattattgcccttggtaccccaaaccttgtaaaaatatgtttccttaaaaagttgaccaccaccttggcatcatttgtgggtaatgcagttgcttcaacccacttggaaacataatccacagcgactaggatatattgattgccaaatgacttaggaaatggccccatgaagtcaatgccccatacatcaattaattccacttcttgtatgttgttcaagggcatctcatctctgcgagacacgttcccggttcgttgacagctatcgcattgctgcacaaagtcttttgcatccttgaatatggttggccagtagtagccacattgtaagatcttttgtgcagtacggttgacaccaaaatggcctccgtagttggaggaatggcagtgccacagaatatccggcacttcgcattcagctacacatctgcggataacattgtcattacaatggaagtataaataaggattatcccacagatacctcttggagtcattcaaaaacttcttcctctgctgccatgtaaatgtttcaggtatgatttttgcagctttatagtttgccatttcagcaaaccatggagtaactctaacagcaaatatttgttcatcaggaaaagcttcatttatctccacttccggtccatcttgcagctccttatgctgaattctggatagatggtctgcaaccttgttctctactccagctttatccctaatttccaaatcaaattcctgcaagagtaacatccagcgcaacaaacgaggctttgcatcttgtttatgcagtaaaaatttaagagctgcatggtcagtataaataatcactttagaccctaccaaataagatctaaacttatctaaagcataaactacagctagcatttccttttcagtagttgcataattaatttgtgcttcattcagaattttactagcatagtaaatgacatgcaatcttttttcctttctttgtcctaaaacagcacctactgcataatcactagcatcacacatgagttcaaaaggtaaactccaatccggagcaattaaaactggtgcaatggtgagtttttgctttaaaacgttaaatgcattaaggcatgcatcatcaaacacaaaatctgcatccttctccagcaattggcttagcggttttgcgattttggagaagtccttgatgaatcgacgataaaatcctgcatggccaagaaaactgcgaacaccactcacgttaatagggggaggcaatttttcaattactaacaatttagccctatctacttcaagtcccatttcagagattttgtgtccaagcactataccttccctcaccataaaatggcatttttcccaatttaagactaagttagtttcttggcatctctttaatactttagctaaattagtcaaacatgaatcaaaacaagacccaaaaacagaaaagtcatccataaatacctctaggcctctctctaccatgtctgaaaaaatagaaagcatgcacctttggaaagtggcgggtgcattgcacaacccgaatgacatcctcctatatgcaaatactccgaatggacaggtgaatgcggtcttttcttgatcttccggtgcaactgagatttggttatacccagagtaaccgtcaaggaagcagtagtagtcatgaccggctaatcgttttagcatttggtccatgaatggaagtggaaaatggtccttgcgagttgcatcattaagccttcggtaatctacacacattctccagcccgtgattgtccttgatggaattaattcattcttttcattttgtatcacggtcattccacctttcttcggaacaacttggactggacttacccatggtgtatcagaaattggataaatcatacctgcatccaaaagcttaacaacctcctttcttgccacttctttcatcgctggattaagccttctttggggttgtctcacaggtttcacgtcagtgtccattaaaattttatgagtacaaaaggaggggtttatacctttaaggtctgaaatagaccaaccgatagcagatttgtgctccttaagtaccttgattagcttttcctcttcgaaccattccagccctctattgatgataactggataagtttcatcttcaccaaggaagacatactttaaatgttccggcaactcttttagctcaactttcggtgcaccggaaaggatgtcgtcttcttttactttcagctcttctagcatcggttctgctggtttttctgcattcttagaattggttgttgcatctttttcttccactacatatgttgtttcaatgttctcctctgcagaattttctgcataatatacagcaactgtggtttcaaaattctgcagctgtccttgtactgctgctggtaagttttctgcttgtgcctcttggatagtgttggctgcatcttgtgctatattttccttatcaattgctgcagcacttgtttcaaaacctgcacaaatcacattatccaatacatctagacgaaaacagtcatgttcatcattaggatgtttcattgcatcaaacacactaaaaaccacagactcattatccaaccttaactctaatttaccctgctcaacgtctatcaaggccctagcagtggctaggaaagaccttcctaaaagtagaggaatttcactttccccttccatatcaagcacaatgaaatctacagggaatataaacttatctacctttactagaacatcttctattaccccggagggtgttcttaatgacctatccgctaattgcagagatactctagttggtttaagttcagctatgcctagggacttacacatagataatggcatcaaatttatactagcccctaaatcacataatgctctacctacatcaatattaccgatagctatagggatattaaaacttccgggatctctcaatttaggaggaagtttcctttgaatgattgcactacactcctcagtaagtgctatagtctcacaatctttcagcttatgtttcttagataggatttccttcataaattttgcataattgggcatattagctaatgcctcagcaaatggtatattaatgtgcaatttcttaaacatgtctaagaacctggcaaactgctgctttttgtagttgttgctttgtcaacaccggatatgggggcttttcaaaacgagaaaagtcccacttctttggtggaggcataggatcgtgttcctccaatttttctgcaactttgtctttgtcattttcatttgctgcagaatttttctcagcttctttagcatttgattctggtttctccggggtaaccaataccttaccacttctggttgtgatggctttagcatgttctcttggattcacaaccgtatcacttggaaattgaccttgtgacctctcagccatttgttttgcgagttggccaatttggttctccaaatttctgatggaggcatcttggttggtccggtgagcccttgtctcagcaataaattctgtggtggtcttagtcagctgcatcaccactttttccagctctgaaggttccttatttgggatgggagggggctgcaaatagttgttggatttgtaatccaagccacctccttgaaatcttctttgataattatttccagctgcataattgtttctttgatatggttgctgctggtatggttgttgctgctgtctttgatcgttccaaacactgtttacctgcacagggtcagcaccaacaagaataggacaagtattagactcatgctcaccttggcaatattcacataccatgcgtggttgattaactgccacttgtgctgcagaaacttgcagtctatctattttctcagttaatttggctagttgatgtgccaaaatcttttgttctgcaagcattgcatcgttagtggaaagttgaattggttctctctttggctgatgtgtcatactttcattttcgttctgggccaaagaattgatcagctcatatgtttgtgtggcggtcttggaccttatagttccaccagctgcaacattcactatcatacgtgtttcaggagtcatgccattgaaaaatattcttacctgcttacctacaggcatatcatactgtggacatctcctgatcaattcttggaatctattccaagcggcgcaaagagactctcttccattttgcgtgaaattggtgatttcattcaccaaacggttatacttgtccattgaaaaatactctgcgaaaaatcttgagactaaatcctcccaagttgcaatgctattagatgtttgacggttcaaccacctcaaagcatgtccttttacagcaaacggaaatagactcaatcttacggcatcatcggagactccttgatgtctaatggtatcacagattctaagaaatctatctatgaaatcatgtgggtcttccgaatcatctcctccaaactgactgcgttccaccaatgctatcaatgaaggatttatgtcgaagtgattagcttggattggtggtctcacaatactagagttgggtcttgtgaacataggagccagaacatcctccattagttcatcttctggtctcagtcttggctgatttggtggttcttcagccatctcttcttccgactcaaattctggaagtgaatcaaagtcgaattgttcagcttctcttcttctttgcctagctagcctccttcggagtgttctctcaatttcaggatcgaattccaattcctccgagctaactgaacttcacataaaaacttagagaagcgattagtaacaaaagttcaatcacaaaaattaaaaattactgtaaaatctgttaccaatccccggcaacggcgccaaaaacttgttgtgtgatttgtataaatacggcaagtgcaccgatcatttaacaagtaataaagtatgtaagtgagttatcgtctccacagggattggaatgattttgcagtaattaaaacaattgtgattgaaacagagaacagaaaattataaagaagttgttgaatgattgtgttgattgaaaacgaaaattaaacaaaacagtaaatttagacttgaaagattaccaatgagaattaattgtggtcaggcacaatctcttataagcattacctcttcacttgattgattcttttacttgaagtttacataagataaatctctcctaatattgtaaatactagataactagtaatttcgccctttaatttgatcgagaaccctaaccttctagcaattctgtcaaactaagaattcagagaacaaatcctatgggttcgtgttatgtttattcggagaataagtcttttctattttagttaatccctaatgtcttagtgaattaaccctttaaactgagttcataacctaatgtcttagtgaaattagtcagttcaagcaattaaagaacatattatagcctctgcactcatgcatccctatgtctaggtgaagaacaagtgttattcttaacaggtcagatattacacccccaacgtgtccattgtgaattgcaactctcaatacttatctagagtgatcaattctaaacaagataactataagcacagaaaagaattaaataaacaaaacatatgcattcaataccagtcaaattacagaggataactcataagttcatggcctttccacaacagaagattagcctgccataggcttcaagaacaccaaagcaattggatgaaacattgttatgcagaactttgtctcaaattcctgattcctagggttttcaatatttctcaaaggcttttcctatgtcaaagactgtgtatctgatgattcccccatcccccattcctgctctgaggcttcatatttatagccatgtttaataaaggcaagaaaaccaaaagataattctaatttcgaagttaatcaattaaaactggaaacaaaatccactccacgctatcagcgcgcgactccacgctcatagcgtggacctttcgaaagcacggcgctactagcgcgagtcctcatgctagtagcgtgagttggtcgagtcttcaggctgattccaggcttctttcacgctattagcgtggatgtcacgccagtagcgtgagttcttcgagtcaattgccttgatttcgtcttcttcacgctattagcgtgagtttccacgctaatagcgtggatctttcgagtcttcaacctcctttgccctttatttggcgctgatggcgtgaatacccacgctgatagcgtgggccttcaatcttggttttctctttttacttgagttttcctccttttaacctgtaaaatgctcaaatggtcttgaaattaattcaaagtaataaaaaggctaaactaacctaattccatcctatttcctacatatttaattaaaatctaactttaaaactatactaaaaactagatgtgtttgcaacacatcatctctcagccaactgttttgcaatttgaccaatctggttttccaagtttctaatggaagcatcttggttagtcctgtgagctcttgtttcagatataaactctgctgttgtttttgacagctgcatcacaaccttttcaagctcagaaggttccttattgggaataggagggggttgcaagtagttgttggatttgtagtccagaccacctccttggaatctcctttgatagttatttccagcagaaaaattgttgttcctctgataggattgctgctggtatggttgttgttgcctttgatcattccaaatgccatccacctgcacagggtcagcaccaacaagaatagggcaaacattagattcatgctcaccttgacaatactcacagaccacatgtggttggctggctgaaacttgggctgcagagacttgaagtctgtcaattttttcattcaatttagctagctgttgggctaaaattttctgctctgccagcatggcatcattgctgcacaattgtattggttctctctttgactgaatggtgatgctttcattttcagtacaagccagagatctaatcaactcataggtttgagctgcagtttttgactttattgtgcctcctgctgcaacattaacaatcatacgagtttcaggagtcataccgttaaagaaaatacgtaccttcttacccacaggcatgtcatattgtgggcatctcctgatcaattcttggaatctattccatgcagcacaaagggattctcttccattctgagtgaaattggtgatttcattcaccaaccggttatacttatccatggaaaagtattcagcaaagaaccttgagactaagtcttcccaagttgagatgttatttgatgtttgacggttcaaccatctcaatgcatttcccttaacagcaaaagggaataagcttaatttcactgcattgtctgagaccctttggcgtcttatagtatcacagattctgagaaatctgtctatgaaatcatgtgggtcttcaaagtcctctcctccaaattgactgcgttccaccaatgctatcaatgaaggatttatatcaaagtgattagcttgtattggtggcctcacaatactggagttaggtcttgtgaacatacgagccagaatatcctccattagttcatcttccggtctccgtcttggctgattaggttgttcttcagccatttcttcttttgactctaattcaggaagtgaatcaaagtcaaagttttcagcttctctccttctttgtctagataatctccttcggattgttctctctatttctaggtcaaactgtaaatcctcagaactagctgaacctcgcataaaacttggagaaatgattagcaacaaaaattcaatcacaagattaaaattactgtaaaatccgtttgccaatccccggcaacggcgccaaaaacttgttgcgcgactcggcaaacacggcaagtgcaccgatcgtttccaagtaataaagattaggtaagtgagtatcgttctccacagggattagggtgaattcacagcaatactaacgaatgtgattgaaattaaaacagaaatatgcagagaaaagtgtttgttgattggattggttgtgttgaatgtaaagacagaaattaaagaaatgcagtaaattgatattgaagattaccaatggaagaataattgtggtcaagcacactcccctctgattcctcctctttcacttgactggtttattaactttaacgtacacacatgataaacctctcctaaattcttaaaccctagataactagcgattcaaccctttaattcgatcgagaaccctaagcccttagtgattctgtcaaactaaacatttagagaatatatcatatgggttcctgttatgattgttcatagaataagccttccctagattagttaatccctaattccttagtgaatcaaccctttaacctgaattaaaaacctaattccttagtgaattctatcagtttaagcatttaaaagatcatattataaagtctgcatttacgcatccctatccctaggtgatgaacaaatgttattcttaacaggtcagaaattagaaccccaacgttcccattgcgaatcctaaccctaagtacttaattgaagtgatcaattccaaataagaatatgaaagaagaatagaaaagaataaaacaatcaaaacatatgtatttctataccagtcaaattacagaggagttctcatcagttcatggcctttccacaatacaagaattagcccgccataggcctcaagaacatcaaagcagtagaataattcatagttatgcagaaaccctagccttgattcttgaattccagaggttttgaggattagaagaatgtaaaatatggtattagatgatgatagatgatattctggatgcctctctccagtctccctaggcctttatttatagaatcatttaattaaggtaacaaggcataagttgtgctcaaattcgaagcatagttaaaacaggcaacataatcttcatggcgcgatccgcgcgtgatcccgcgcgggtctttcgaatccacggcgctgatcgcgcggacatccacgctaaccgcgtggatcattcgagctggatggcctgatgctgagattcctggcgttgacagcgcggatttggcgcgacccgcgcagggtcctcgaatagatggcgctgatcgcgcggacctggcgctagtggcgtgagttgttcgagctggggaagcttgcctttcttgatctggcgctaatggctcggagtctggtgcgactagcgcggcttgttcgaatctgaggcctgttgatttacaggtggcgcaatccgtgataaccacgttgtcggcacgcaccaaaacaattttactaagctaattctgtagcacagagctaacctaggttgactcagagacacgatcaatatggttctagcttcaaatcattggtaataataagggggtttttgtcaaacagttggtatgcgtaaagtaaaaatgcaacaacacaaactaaaattaaagaacaatgcaaagattaacaagattatcaaggaataaagtaaaacaaataggaaagcatcaatccaattcactaacccaagctatttgaatcatcatcattcccataagttgattctaacatgaacattcattcaatctcattagaagttgttcaatcgaattaacccctaatttaattgaaaccacaaccctaattgaaatatcatccaattaattatgtgattatcatttgaaattaagacatgaatccataatcctaattcactttcaatcccaaatgcattcataatcatgaaaacatagtagaaattgaagaagaaggtgaatattcaagtagaaatcgaaataccgaaccggaactccaattcttctcttgcttgagttagatccttggattgattagtgatttagcctcccatgatgatcaccaaggaaagccccatgaaatgagtgcagaaaaatggaggaatagtaaaatggaaatgaagaagatgaagaacaatgaagaacacttgagagaaaatgaagaacaagcttttgatcctaaaaactaaagaaaagaaatgtaaaagttgtttattgaattataagtgtgttgtccaagtttcactaagtcactaatacatatagtgactaagttctgaaaataaaatgggccacaaacaaactcaacaatctaattatttgctatttacaaccatgaaagtcaaattcgtagcccaaaattacaagtgcaaggacgttaacttcaaagctaaaaattaccctctaaatgacagaattggcctcgggctatttgcagcaaacatgtagatcttttcgttatctttctagggactcctagaacgctccattcagagattggtagctccctataggtcttgtacaagtcagatacatcaagtgagccaaaaatccgaaaatacgcaacaatatagcaattaagcccacttacttacctaggccaaaaactgaattagaataggaaaataaaggtccaagagaggtcaaataagctaagaaggatagaaaaatactcaactaaaaaccctctatcaaaatcccccacacttaaacttttgcactcctgggcaaaactaaaagaaagactaagagaaaaaattcaaattaaagtaaaccaaaaatttaaagaaaggatatgaacaaggcacacatatttttcaatggatcataacaatgctcaaaagtgagaaatggaaagatggaagaataatattgaggtgacaaacaatccatgaaaacatgatcacaaagtgcaaagtgaaaaagtagccaagtttagaatcaagaatgcaccaaggtgatagaattctctcaaagggtggcactcaacctcacatgatgtgtatggcttgtatttacactcaaacaccacatgtaagtagtacatccaagcattgacaaacctctcattcattcaacttgaaatacacatgcatcaaaagatcaaaaggactttattagcttgtaatgaatggcttagggaagggtggataagaaaaggatatttaggctaaagcttaagagaaaagagggacaatggggagcaagccaacaagataaaagaagggtagaagcaaggtgaaatttgaaagaatttacaaggatgaaaataaagtataacaacttttattgcatatatttttttttctttgcttgaacttctttttctttgcttatacacaatttttttctacttttcttctttttcttcttttctttgaacttttgctatttgaactctttcttttctcttttttcttttcttttctttcaaaacaaaacaaaagacaaacaccccacacttgtttgaaacccactcccaaaacaattccaaagccccttttctccctaaagctagggtaacatggttttccatcattttttagtttttaatgggctaaacaagaaagaaaaggctaaaagctcaaagagggtgacaatggatatcaacacaaggataggtttatttggctagtggctaaaagaaagaaggcctaaatcatctcaatcaaagcatgtgcaacaaggaatgtcaaaagaggcaagacaaaacatagagtaatctagcacaagggtgaaatcacacatgaaagaacatattcacaaaggctcaaaaactcacaagggatagttctaccacacatggttcatcttaaattctatttctcaagcctacttatcacttcaacaattgcaacaatgattcacatcatgtatgaaacctctcaatccaaccaactttttaacatttctcacaatttatgcaaattagaaatcctatgaaaaacatgaaaaattgcctaaattcattaaaaacagcagcaaacagaaacagcagaaacagacaacaaaaatatatacagactcaaactgaaacaggcaaacagaatatatacagatagctaaacagaaaacagacagaaaacagaaaacagaaaataacagacattgacaaacagacagacagacagataaatagaaaacagaaaataacagacattgacaaacagacagacagacagataaacagaaaacagaaaataaccaaagtttcaaaaacaaaaattttaaggacccttcacccccccacttgaaatgcacattgtcctcaatgtaagcatgcaaagaaatgcaacaaagagacaacaaataaaagaaggataaaggaaactccccaaatgtcattcaagacacatcttcacacaaaatgggtaggaccaaagagatgtcctccataagctcttcgtccacttgagggctctcatgaaatgctttgagttggtgaccattgaccttgaagatttttccggtaccttcattctttatctcaactgcaccatagggaaaaacattagtaataacaaaaggtccataccatctagatcgaagtttaccagaaataagcttaaggcgagaattaaacaataacactttttggccactatggaactcctttctaagaatcctagagtcatggaatttcttcactttctccttgtaaagcttggagttctcataagcttccaaacgaatctcctcaagctcttgcaactgaagctttctttgcatacccgcttcatcaaatgccatgttacaactcttcaccgcccaataagcacggtgctcaatctccactggaaggtggcatgccttaccgaaaaccaccctatagggagacatccccaaaggtgtgcggtaagcggtcctatgagcccataaagcatcctcaagaagcttgctccaatcctttctgtttggttgcaccaccttctgtaacacttgcttgatctctctgttaaaaacctctgcttgcccattagtctggggatgataagctgtagcaactttatgcacaaccccatacttctgaagcaaggatgcaaatgatcggttacaaaagtggctcccctggtcactgataatggctttaggcacaccaaacctgcaaaaaatgttggatctcacaaaatccacaacaactttagaatcattagttctggtggccttagcctcaacccatctggaaacataatcaacagcaagcaaaatatatgaaaagccatgagaaacaggaaatggacccataaaatcaataccccagacatcaaaaatttcacaaaaaataatgggttgctgaggcatctcatgtctatgtgtaattgtgcctcctgctctctgacactgctcataagtggtggtaaagtgatgagcatctctaaacaaggtgggccaaaagaatccacaatctaacaccctcctagcggtcctctgaggaccaaaatgacctccggtaggtgtgccatgacaaaactgaagaatagactaaatttcatggttaggcacacaccttcggatcacttgctcactaccaaacctccacaaataaggatcatcccaaacataatatttagcatcactcttaagtttagctatttgggacctagatgcatgaggtggaacaacagatgcaacaaggaaattaacaatgtcagcaaactaaggtgtgacatgtgatgaatgcaaatgcatcaaatgctcatcaggaaaattatcacgaatgggaaaggactcaagaggtccctcaatcctactcaagtgatcagccaccaagttttctgcaccacttctgtctttaatctcaatatcaaattcctgaagaagaagcatccacctgatcaatctaggtttagcatcaggcttcttcaacagatatttcaaagctacatggtcagtaaagacagtgatatgggagcaaagcaagtaggatctaaatttatctaaagcaaaaacaatagccaaaagctccttctcagtggtggtgtagttaacttgggctgcatccaaggtgcatgaagcataagcaatgacatgggatagtatgccaactctttgggacaacacagccccaagtgcataattagaggcatcacacattagctcaaagggaagctcccaatttggcgactgcatgatgggagaggtagtcagcttcctcctcaatcccttaaatgcctctttgcaaggctggtcaaatgtaaagtctacgtccttttggagaagcttggacaatggtaatgcaatttcactaaaatcctgaatgaatctcctataaaaacctgcatgtccaaggaaggaacgtacttcccgcacagaagcggggtaaggcaaagaggtaatcacatcaatttttgccttatcgacctcaatacctctactggagaccaaatgtcctaggactataccctcatgcaccatgaaatggcatttctcaaagttaagaacaaggttagtactaatacatcggtcaagcactctagagagactatccaaacatgcatcaaaagaggaaccataaacagtgaaatcatccataaacacctccatgcaactctctaataaatcagaaaagatacttaccatgcacctttgaaaagtgccaggtgcgttgcataggccaaaaggcatccgggtgtaagcaaatgtgccaaatggacaggtgaatgtggtcttatgttgatcctctggtgcaatgtggatttgcatgttgttgcgcgatttatgcgaatgtgtacggcaagtgcaccgatcgttaacaagtaataaagtaggtaagtgagttatcgtctccacagggattggggtaatttttacaataatattaattctaaatgattggaaaataaaatagcaaataaagagataattgttgatgttggatgattggttgaataaaaacagaaattaaaatgtaataaaatagtaagaaaatttaccaatggaagaaacaattgtggtcaggcacaatcccttttgttcctacctccttcacttgattggtttattatcttaagtcacacacatgataaatctttcctaaattcgtaaatcctagaactactagagtcataaccagcgatttaaccctttaattcgatcgagaatcctaaacccttagtgaatctgtcaaactaagtattcaaagaatatatctcatgtgatcttgttaagattattcggagaataagcctttcctaagttagttaatccctaatgtcttagtgaatcaaccctttaacctaattcaaaaacccaatttcttggtgaattctattaagttaagcatgaaaaagaacatattataaaatccgtagccacgcatccctatgtctaggcgaagagcaactattattctaaacatgtcagaaattagaaccccaacgtgtccattgcgaatcctaaccctcaatacttaaatagaatggccaaatccaaataagaataaaacattgaatagcacagagtagaataaaataatcaaaacagcattgaaaccaataccaaatcaagttacagaggagttacatcagttcatggtcttcccacaatacaagttcagtctgccataggcttcaagaaaccaaacgctatcacataagacattcttgattgaccttgccttgattcttgacttccaatggtgaaaatatgagaaggagagagtagaatggatgatagaaggtaatggtgggatgattagagatgtgagataatggatgtctctagaaccccccccagaggcctttatttatagatagatctaattaaggtaacaaggcctattttctgttccaaatctaaatcaaatcttcttaattaaggaatctaaatatatttatagaatcacttaattaaggcaactaatcctaatataataccaaatcttgaaatatatgatttaaataaggaaactgtttcaacctcacgctacccgcgcgcgataccacgcgagtcgcgtggactggcagaaaggaatgacgcgtgtcgcgtgaagtgtgaagtgcctcgcgtgaagtgacagaaggtaattgcttattgctttgagtcttcacgcgacccgcgtgataaccaagtatgtcgcgtgaagtggcagagttaaaaggcttaaatcttgaagttcccacgcgatccacttgaataacggcgctacctacgtgatatcctcgggtcttctacgcgactcgcgcgagtaatggcgcgacacgcgtgacactccagaacttgcttcttttattatttattctcctcttttgacctgaaattgcacaattggtattgaaattagatttaaacaataaaatactaaactcaactaattctaagctatttacctaagtatttaatcaaattctaacctaaaactagactaaaaacaagatgtgtttgcaacacatcacatgtaaccagaaaaaccatcaagaaagcagtaatgtgatttacctgccaacctctctaaaacttgatcaataaaagggagaggaaaatggtccttgcgagtggcttggttgagtctcctgtaatcaatgcaaactcgccaactattggccactgtagtcggaatcagctcattatcttgattcttcacaactgtgagtcccgacttcttaggaaccacttggacaggtgaaacccaagtgctatcagagatgggatagataatccctgcagccagtagcttcgtcacttccttcttcactacatcaagaatagtaggattcagcctgctttggggttgcctcactggtctagaatcatcctccaaaagtatccgatgcatgcagatggaaggattaattccaggaagatcagcaagtgtccatccaatggcctttttgtggcctctcaagacatgcatcaacttctcttcatactccagtggcagattactagatatgataattggaagcttctgagcaacatctaaataagcatacttgaggtgctcaggtagtgacttcagctccaagaaagggggctgaatagtggaaggtaagggaagactagaagctgaggaaagtgggatagtaggctcagaacttgtatccgtacctggaacataatcagagtgaagtgcggaggaaatttccgcacaaatgctacacacagcagcagaatcatcacaggtacaattacaagaaccaagatcaaagtcagaaaagtcagaagaaagatcagaaaaatcataaagtaaattagaaatatctacactatctactgcagcatcaatgatatcaaggagaaaaatagagtgctcctcaacaggatgtctcatagcctcaaaaatgttgaactgaacaatgtcatcaccaaactccatagaaacagttcccgcatgcacatcaattttggtccttgctgtcattaagaatggtctccctaggatcaaggtgggaccatggctgggagactcattctccatatccaaaatgtaaaaatctgctgggaagatcagattattaactcgcaccagcacatcttcaataagtccaagtggaattgcagcactcctgttggctaagtggatgacaataccagtgggtttcatctcacccaggtgtagtgctctataaactgatgtgggcatgacattaatggaggctccaagatcacacaaggcatctgtaaaattaatatctccaatggtgcatgggacagagaaagtgccaaaaacatcaagaataagaaatagaaccatctgatttgattcgttctcaatagccacaagatgatcatcttagggtgatccttttgttgacggatgctcctattatactcgtagtctctgaaggattgcacttctgtggcaaggaagatagtggaatggcatcaacagttttaccctggatcagtgcggaaacatttctgcccatcttcacttgctcatttcccttaagctttctcttgtgggtgcacaaatccttcaagaactttgcatattttgggatctgtttgatggcatccaggaggggaatgttaacttccaccctcctgaaagtctcaagtagatcagaatcaaggtccactactttctttgcaggaatggctctagaaggaaaaggtaagggaatctgttttggtgcagaatctgtcttggcaccatcatcaacttttttaccagtaccggcatcactcttagcaccagcatttggaagttccgtgccactcctcaaggtaatagcactcacattctttggattaacaactggtcgtgctggaagattaccagaaccttgttgttgcatctgattgacagttgtagctaactgtccaatatgagtttgtaggtcctggatggtggcactgacattttgttgaaactggaggttactggttgtcatttgcttcatcaagtcctctaaagaaggtccagaactggcctgcacaggtggtgtaggtgtaggtgcaggtggaggttgctggaactgtggttgttgtctaaaaggaggaggttggtatttagtggtggcaggctggaaaggttgttgtggaggtctaaaaggctgctgttgttgtgggccaggaccatacctcaaatttggatgatctctccaaccaggattataagtgttggagtaaggattatactgctgttgaggtctaaatgactggccaagttgcatggcagaaacttcagcaggttactctgtctcttggagagtggggcatgcatctgtaggatgatcaaagccttggttgattggctgccatcacagtctgttgttgctcaatagcaagctgcctcacaagagatgtcaactcagtcaatttgttctccaatctctggttatcagcaaccatggagacagaagcttcatttgcagccagcaccttagttgttgtaactctagcaccaaattgttgatagttggctgccatgttagaaatcaactgccttgcaacaagaggggtcttatccatcagagctcctccactagctgcatctatcatactcctatccatcaacatcaagccttcataaaaatattgaatcaataattgctcattgatttgatggtgaggacatgtagcacacagcttgttgaatctctcccaatacttatacaaagactctccagggaattgccttatgccacaaatttcctttcggatggatgctgttctaaaagcagggaagaatttctccaagaatcttctcttcatgtcagtccaagtggtgataggatctggttgaaggtacaaccaatccttagcaacaccatccagagagaaagggaatgcattcatcttgacataatcctcatgaacatcatgaggtcgcatggtggaacacaccacatgaaactccttaaggtgtttatgtggatcctcaccagcaagtccgtgaaatttaggaagcaaatggatcaggccagatttgagttcataactgacctcggtctcagggcattgaatacaccagggttggtaaacaacatcaggtgtagctaactccttaagagttaggttgttttcagccataatatcaagatgtgtagaagtagaatcagaatcaaagtcagaagacgctatactactgtctaaaactacactatcaaagtcatctaacctaaggttttgtctatttaatctatgaaatgtcctatctatctcaggatcaaatgaatgaaattcacttgatgtggacctagtcatgcacaatgcacctaagttttttttttttttttttttacgctggcggctattagcgcgagattggcgctaccagcgcgggatgctcgggaagctggcgctatcggcgccggtctagcgctaccagcgcgggattgccgaacctgtggcgtgactagcgccggtctggctcgatcagcgcgggaggttctgccagttcacgctatcagcgtgggagccgcgcgatcagcgccaattggacgctgtgctctatttttctgggtttttctctgtttttctgggttttcctttgtttttatgggtaaatacaaagctaatgcagcaaccacaagcacataatcatgtaacaaacatagttgtgcaacaaaacgtaaaaatgcaagaattaaaactacttctatgaactaattacaatgaattaaagctagcacacaataaaccgtatccccggcaacgacgccagttttgataaccacgttgtcgacacgcaccaaaacaattttactaagctaattctgtagcacagagctaacctaggtcgactcagagacatgatcaatatggttctagcttcaaatcattggtaataataagggggtttttgtcaaacagttgatatgcgtaaagtaaaaatgcaacaacacaaactaaaattaaagaacaatgcaaagattaacaagattatcaaggaataaagtaaaacagatgagaaagcatcaatccaattcactaactcaagctatttgaatcatcaacattcccataagttgattctaacatgaacattcattcaatctcattagaaattgttcaatcgaattaacccctaatttaattgaaaccacaaccctaattgaaatatcatccaattaattatgtgattatcatttgaaattaagacatgaatccataatcctaattcactttcaatcccaaatgcattcataatcatgaaaacatagtagaaattgaagaagaaggtgaatattcaagtagaaatcgaaataccgaatcggaactccaattcttctcttgcttgagttagatccttggattgattagtgatttagcctcccatgatgatcaccaaggaaagccccatgaaatgagtgcagaaaaatggaggaatagtaaaatggaaatgaagaagatgaagaacaatgaagaacacttgagagaaaatgaagaacaagcttttgatcctaaaaactaaagaaaagaaatgtaaaagttgtttattgaattataagtgtgttgtccaagtttcactaagtcactaatacatatagtgactaagttctgaaaataaaatgggccacaaacaaactcaacaatctaattatttgctatttacaaccatgaaagtcaaattcgtagcccaaaattacaagtgcaaggacgttaacttcaaagctaaaaattaccctctaaatgacagaattggcctcgggctatttgcagcaaacatgtagatcttttcgttatctttctagggactcctagaacgctccattcagagatcggtagctccctataggtcttgtacaagtcagatacatcaagtgagccaaaaatccgaaaatacgcaacaattagcaattaagcccacttacttacctaggccaaaaactgaattagaataggaaaataaaggtccaagagaggtcaaataagctaagaaggatagaaaaatactcaactaaaaaccctctatcaatccgcgcggggtctggcgcgatccgcgtgggactttgaatcttgttttcttctttcttttgcctttattctcctcttttaaacctgaaactgttcaaatggtaattaattgaattgaaagcagataaaatgataaactaactaatttctaatctattttcctaattatttaaccaaattatatcctaaactaacctaaaactaggatgtgtttgcaacacatcactccttcctcaagagatctatttttcctctccacaacaccattttgctagggtgttcttggagctgaaaaattgtggttaataccattttcctcacagaatttttcaaaaagttcattttggaattcaccaccatggtcacttcttattgaaacaattttacatcctttttcattttgagcaagcttggccatttttctaaaagcaaggaaagcatcacacttggatttcaaaaacaaagtccaagtgtatctagagtaatcatccacaatcacaagtccataatagttgccacctaaactcatagttcttgaaggaccaaacaaatcaatgtgaagtagttcaagtggtctagaggtggaaacaatgtttttactttgaaaagagttctttgtttgtttccccttttgacaagcatcacaaagtttgtccttctcaaatttgagttttggtaacccaataactaaatcttttctaatgagcttgttcatgtgatgcatgtttatgtgacttggtcttctatgccacagccaagtttcatcagctttacttattaggcaagaagatttatggaataatgcatgatcaattgaaagcacatatatattacctttccttttacctatatgcagtacctcaccacttttctcatctgagattatgcagcaatccttattgaagttaactttaaagcctttatcacacaattgacttatgctcaataaattgtgctttagtccatctacatacaacacatttttgatctttgccttaatgctgtctccaatattgctttcaccgatgatcttccctttgttgttatcaccataagtgacatgtcctccttcttttaaagtcagatttgagagaagggacatgtctccagtcatgtgtctagagcatccactgtcaagataccaagttgatgtcctagctcttagacacacctgcaaaaagcaaatcaaattttaatagaaggtacccactcaaggttgggtccataggggttagcatttcttctgactttgggaatccaaatgcaatcaccattaggcacatagaatctcctagcatagcatttaaaagatgtgtgcccattcttcatacaatagttgcaagtgacggattttgaagttttcccaaaaccagagtatttgttgactcttgagttcttttgccacttttgattcttctgtttttgaggtacaaaaactgtttttccatatgattttgaaccatgtttataccccaaaccagaagtatctccagcatatttttgcacactcaacatttcagccaagttgcattttcctttataaaactttctcaagaggtcaatcaaataactgttattggataaaagcaacatatatttttcaccttgactctttttatactcatcaaagtctttttgaagcaagttatacttatcaacattgctagaagaagtggcacacacacatccatttaatttgtaacttgaaacaagtttttcattctcttccttcaagttgcaaatttcattttgtaaatcagttattttctcaatatgccatctaagatttcctttgagcttattattggattttgcaagtttttgggcttcctcatacatttcttgaaaagcatgaatagcttggtcaagttcagaatttacctcttcttcctcacttaccaaatcatcatcatcatcattgatggtggaggtaagacacatgtttgcttcttcattttctgtggaagaatctgaagatgttgactcattatcctcccaagctatgtatgccctctttccttttccttcctttttcattttgctttcaccttgttgctttctcaaagtagattgaggactcagatttgatgtgacccggtttgccacactcaaagcatgtgaaattattgtcaatcttcttgttgaggttgttgttgatgttgctgtttttgttacctttggtgaatctcttattcttatttttcttcagaaatttgctgaaccttttgaccaccaagttcacattgtccttatcatcctcttcacttgattcctcctctttttcagctttcaaagttgcagcttttaaggctatgcttcttgttttcttttctgcatcttcacaagatgttaattgagacatttctaattcatattcaagaagcttaccaaacaatgcagccatggacatttttgacaaatccttggactccttgattgctgtaacctttggttgccaaggtcttgttaagcacttcaatattttgatatttagcttttcagtgtcaaaggcctttccaagacccaatagatgatttacaatgtgtgtaaatctagtttgcagctgagaaatgctatcattggaattcatcttgaacatttcgtactcatggatcaaagcatgcttccttgatcttctaacttcctcagttccttcatgagtaatttccagcatctcccacatctcttttgcacttgtgcatctcacagtcctgaaaaattcatcagaggaaagtgcagaggtgatcatatttttagctttaaaatcatattggactactctttgtttagcctcagtcatctcatctcattctttgggaatcaactcatttgcaacagttttctttggaataaagggacccttctcaatagcattccatgctcctgggtcatttgattgaataaagatcttcattctatttttccaaaaactaaagtgttccccttcaaacattggaggtatgtttaaagaggcaccctccttaaaggttatttgagaagtattcatgtttctttttgaaaagaaaaagtgatcttgaatatcttacaagaaccaggtctgataccaattgaaaatgataagaatacttcaacacaaccaagaggggggtgaatttgttgaaccttgtccaattaaaatttaaaatcagagtattaccacaagatctttatcactttcaaaactatttcaaaaccaagaatcaatattcaatcaaattccttttacaagaagaatagaaaacatagtataattttctgtgcaatgaaattgattcaaaaacaaagcaattaagagatgaataggtgagaagaaagattagtctcagatttttatacaggttcacctcaaaccctatgaggctacatcctgttcttctactcaacactagagtagagttccactattgtaaaaatattcttataagcaaatttacaagcctttcttcatcaaccctagatgaagttcagagatccaaaaccctattagatccttagagaccaaaacccatactgagaacactactcagctgtcttttagagaaacactatctcacacttgcaagaaactcaattacaatagactaatccttacaaatattcaaagaacagtttacatcatcaaagaataaggaaagctatcacctgataatccaagaatgaatgcacaatgaatgattctcaggttgaaagacagattacaatcacatatgcagtcctttccttatgctttgaatgaatgaagcttcaccttcttgaatcaaaaacccatatgagatttttgtgaagctaagtatgtttagaactcaaagaaactcactaatgaaagctcagaatgtttgtgaaagcccagaatacgaaaaatcaaaagttacaaacttcagagaagtgagttctatttataacagatttttaattgaaaataatcgattaaacatgctcctgtaatcgattatttaccatttgtaatcgattaaatcaagactgtaatcgattaaaatgctcctaataatttctgggtttgggctatgaacaatataatcgattattcagtgaagtaatcgattaaaccagtaagtcatattttcctaaatgagcttagtaatcgattaatacgacatgtaatcgattaagacagtgagctgtgatttttctaagtctatatgcataggcttgtaatcgattaccaactctatgtaatcgattaagacagagagttccatttttcataaaaagccttagcaatcgattaaaccgatatgtaatcaattacaatgatcatgatttgttttctaaaggcacgaagaacaaaataatcgattccagtatatgtgtaatcgattacttaaataaaactttgttttaaccttttaaatgccttagttatatactgcctttgattaaaccttttaatctaatgatcctaaatgaatgattaatgcatgatgtgcacaattggattatcagatcatatacttccttttacaattaatcaaaatggccttcaatgctttccatggaactttgcctttgagcatgttgaaagcacaaaacttttgagcctttgattcttgttcattgatgcttggcttcacttgaatcaacagattttgggctctaaagttcaaatttgaaatgaggaacaattaattcgaattaacccattaacattaaagcatagaagactcaaatttgaattgggtggcaattggacagttacaatttccaagaaaatctgacatattctgtagtaactccatgaataatcgattatatgattatgtaatcgattaattcgtaagcaaaatcagtttctgcagaaggtgtaattgattaattcgtcaagtaatcgatcgtttcagtgaaatttagttaaggaagatgaagtgtaaccaattatttcctatatgtaatcgattattacagtgagatttgaaatataaaatcaatttgaagcttgtgtaatcaattaatttgagtcgtaatcgattattccagaaagatttgttttttttgaaacagtttctcaaacaatttaatcgattaccattcaccgtaattgattattccagtgaatttaaattttctaaaaggacttttatgctgtgtaatcaattaatccgtggcttaattgattattatagagaaattcattttctagaattatttttctatgaagaataatcgattattctgcttgtgtaattgattacataagcagaaattttattataagctatgtttcaagttcatttaatcgattaattcgttctctaatcgattattacagtgaaaatatcagaatgaatagtgttttatgcagcacaacttggaattttggaggcacgtgtgattattgatcaagtaagaagctatttcacatagataagcacataacaatcatgctagtaaagattagattcatccaggatacctagcatgtttctaagagtatagaatctatctctagccaaaggtttagtgaatatattagccaattgattgagagtatcaatgaagtcaattttgatattacctttttggatgtgatctctaaggaaatgatgccttatctcaatgtgtttggtcctttagtgcattattggattcttggaaatgttgatagcacttgtgttgtcacatagcaaaggtatttttttaaattctacaccaaaatcttgtaattgttgctttagccataggctttgagcacaacaacttccagcagagatgtattcagcttcagctgttgataaagcaacacaagattgtttcttgcaatgccataagatcaatgaacttcctagtagatgacaagttccactagtgctttttctatccaacttgcaccctgcaaagtcataatcagaataaccaactatattaattgatgcacctttaggataccaaagaccaacttttggtgttgatttgagatatttgaggatccttttgactacagtgaggtgtgattctttgaaatttgcttgatatcttgcacacaagcacacactcaacataatatctggtctactagctgtcaaattcagcaaggatccaatcattcctctaaatcttgactcatcaactttctttcctttttcatctgaatcaagataagttgaagtcgccattggggttgcagcatctttgcttttatccatttcaaacttcttgattacttcaaggcaatacttggtctgatttagaaatgtcccattcttcatttccttcacttgaagtccaagaaagaatgttagctcccccatcattgacatttcaaactcattctgcatagagatagaaaattctttgcacaacaattgattagttgaaccaaaaattatgtcatcaacatacacttgaactaataagatatcattcctttgtcttttgatgaacaaggttttatcaacatgtcctcttgtgaaagattgttcaagaagaaatttacttaatctctcataccaagaccttggagcttgttttaaaccataaagagctttctttagtttaaaaacatggtttggatatttaaaatctacaaaacttggaggttgctccacatagatttcttcctcaatatatccatttaagaaagcacttttaacatccatttgaaaaagtttaaatccattaaacatgcatatgcaagtaataatctaatggcttccaatcttgcaactggtgcataggtttcctcataatcaatgccttcctcttggttgtaaccttttgcaaccaatccaactttgtttctgactatgattccactctcatcaagtttgtttctaaaaacccatttagtgccaataggttttagagaagaaggtctaggaacaagttcccaaacttcatttttgttaaattgattcaattcatcatgcatggcatgcatctaatgttcatcaattaaggcttgatcaatgttcttaggttctatttgtgaaacaaaagccatattacagcaaagatttttaatgatgatctagtagatactccctttgaaacttcaccaatgatatcatcaagggagagatatcttgtagttctccaatcttttggctcttagactggtgttgattgtttagcttcagcaattggttcttcttttcctttatccattgaatcattaagctgaatgaactcctccaaaggacctgcatcaatatgacacttcttttccttcttggagggattagactcgtcacaaataacatgtactgattcttctatgcacaaggttcttttattgaaaactctatatgcttgctatgtaatgaatatccaagaaagatggcttcatcaactttagcatcaaattttccaagtgattctttaccattatttaaaacaaagcacttgcaaccaaatactcttaaatgagaaatgtttggttttctacgtttgtatagttcataaggggttttctttaaaatagaccttattagcaatctgataagtgccttaatgcagttaaattcatgtttcaaatgcatgcacttaacttttgatttcagaagttttgattataaatttgccctaaacctagttaaatagcacctagtgcttgtacaaaagttgttgttcatattttgtaagattaatccaatcatacgttgtattttgataaatttcgtggattttcgaggcttccgaacaagcaaagcaagcaagaagggctcaaaagattaaacctggtgttggtttcagaagggctatgtgaagaatggaagtagaatcaagctttggttttgagctttcaacatgcattggatgccttgaagattgatttgtgttaaatgtgtaaaaaagaggcatttctggtgatcaagtgcattgcattcatatcattcaataattcaattaacctaagtaataaaattcacaaggctttggtaaaatgatcaatttaaataaaagttttttggaaaaatgaatttgtactgatttaatcgatcacatcaaggagataatcgattgttttattcttagttcattctggaaatcttttcaagaacaatgtaatcgattacatatcggattaatcgattatttgaactttgctttcatataaactgccttgatgaacactttaatcgattaccaacaggcagtaatcgattacattgccatacaatattttaagctgtgctggaagaatcgattaccaaagaattgtaatcgattacataggctaatctaaaaatatcatcttcctgtcataatcgattacaaggttagtaatcaattacatcatatgtctgtgcttaacgtgttttgatgcattaatcaattaccaaatatagtaatcgaatacatagttcaatatgatttctaaagctttttggtttaatcggttaccagaattcgtaatcgattacacagtgtatttcaagattatgaagcttcctgtcttaattgtaacaccccaaaattttgaattacagtcaattcctagggaaaatgttaattagaggcagtacagaaggaattggggaaatgacgaaaatgcccttcgacattttagaaatgaccaaattttccctaggcattttagtaagatatttgaaggaggaaattttataaatactctaggaggtttgaaaaatgagcagaatacccttagggtgacaattacagagtttccctgaacatttttgaaaatgacgattttacccctagggtgaggggtaaaattaccaaaataccctttaggtcaaacaaggaccagatgaccttagaaatttgtgggaacctgaggatgggataaaatactcttagacaacaaattatcaacatggttagtggcagagaatcataatctgtgatttttaggaattttggaaaatatcttgaaaagagctcaatctagacaaccttaggtatcagaaaattataagaaaagtgtaaatataatctatggagttttctcttaattatgggaggaataggttgcctaaataagttatttgattttaataattaaaatccaaatggaccaatgagaaaatgggattttaccattacatgtatttaaaggaaaattttgtaactttggctacaataataaaccatggccgtgtgatcaaggaagaaaagcaatatggaagccttcattaagagaataggacggatagactaagtcaaggagtagaaaaattcaaagctttggccaatagaaatcaagctaggagatattttgggacaaaaggaatcttcattaacttcttgggttttctatggtcaaaaggagtgtgaaacaagctactaggccatgtacacaacaaggaagaggaagaaatgtgtgaaacaagctactaggaaagatattatcccttaagccaataaacattagccaaatggaaagtagtaatgatggcttaagaagatttttaagaaaaacttactcatgaatctttggacacggaggaaattataagcattatttcaaagatcccaacggtcaaaagctagatatgtaagttaggaatatgcctttaaatatcaacggtaagaataagtattttaataatacgggttttggagaaaaatcaataataaggaaaagcataaagcatcttgaacacacttgctataccacgaaaattattctccaagttgagcaaatccacgtgcaaacaagctaaaacaaggaagtggtagccaattcaaagaaggaacttagtagccaatgagagatggactaatggaaagtgaaataatgacttagagaattattggggggacaaagggaatccaccataaatgtctagctcctaagtaggataaggccaagagaaactctccccaaagccatataccaccgtgcaataatgtggaggggaagaaatgtgtggaccaaagttagtcaaggaaccaaccaatgggaaggaagcatgaaggaaagaagatattttgactttcctatataagcaagtgaactaatccatttttggggtcagccaagaaagtgaccgtgcacttcccctaaaaccacaccacttgatgttttttcaaagctttgttgaaaccaattcaaggcataacaagtaacatccgtatttcaccttattccaccttttgttatcactttcacaaaagaaaatcatacttaccaaccttactcaagtccacgtgaaagcaagggaggcaagggagcaagatttattcacattttagaaaataattaaggtatgggaagtttatgagaatcaaagtttgaataagacttatgttaagattcttagatgatttcatgaaaaactaagcttggtattctaagtgtttgatgatttgctttcaagagcttgaatgattatttgtttaagtaacttggttttaaatgaatgaaggagtattggataattaatttgaatctaattcaaagttaaaagaaatcaaaaggtagaggtagtatagctaagaaaatagttgtttaaattatttaaaagaatatgttgttataactttgatgtgggttagaattcttctatgttcctatgttggatttgatgattagaaattagttacaaacatgcttatttatttgaagtatgttaaattttataaagattaaggtttaagtagttctatgatttcaagtgatacaccatgtgtttgatgatttgttctaataaatgaaataggattaagagttgttggtttgaatctttattattggatttgaagtatacttgcatgattgaaggctttaaagaaataattatgtattcttacatgtgttgttgagtgtttccataaaagcacgccaagtgtttgataaaatgttttaaagaaataaaattggttgatgtggtggaatctatgtggatatacatagttttacaaagcttgtgtgttgttgagtgactctgtatactttattaataataatatgatgatttgtgtttgatgaatctatataaagcttaagtggttttatggttttgatgatgaaaaataagttgagatatgtactatgatgaaaatgatgagttaaactatggctatatgcgtagatgttgtgtaaagctttatgtgatgattaaaagaagctttacgtgttgtttaaaaagcatatgccttgagttgtaaagatgttgagttttgaggtgtatgtgatatgagaagaagaataattaaagatgtgataaaataaatcattcatgcatgttccatgtgcatatatacccggtggggtaaatttgtgaagatgttacctcaagaagaggtgtgtcagatagctaaactgagtccatacgttcaaaggcgtctgaacttgggggtggttgagactgtaacgccccaatttactaatcagggacattactaaccacacatcacaaacaagcagttaatcaatcagagtttaagcagtttggaagcatacactagaagtgacagcatcaaagtcactatcataacactgtacatcataatatggtgaatatacatcatagtttcactgtacaatacaaaactgtacaatcatcccatcagggtgcaacaaagtacataaccaaaacatatgagcaacctgctcaagtcctctatcctagtatgtccttcagcagctaatcctgcacaggcttcttgccttgggacctctctgctgctctggaagaatcacctgcaaaacatagccccacacaaggggtgagatataaaatctcagtaaactcagggcccttgaaggtatttccttcccctggttcactgacaacagatgcacagacagaatcatcatcaacacataaacaatcaatgtacaaccatctgtcaatgtccacatgattccgatggtcatcaccatctatcacctatcatcatcatgcggaggctatcacctagacatatatgccgatccaactcacagaggatccaatatatactaggccatctcatggcaggacgtcactatccatcatcaccatcctgcggaggctatcatctatgtatatatgccgatccaactcacagaggatccaatatatactagaccatctcatggcaggacgtatcagaggcacctccgaaaatatataggtacaaccacgtctggaggactcctatataccgggccaacctctatcatgagctacaactcatatctcaatacaattcgcctgaggaggcttcttccgtgaatataggaccatctcactaaggaggctatctctatatcacagaaaacatctcatgtcaggcctatctcaatcacatgtcatctatcctattaccataggatttcacaatcaatcatgcatgtatttagctaaacaaccatagctatgcaccacaatcgcccatcattgggtccaaatcagattataacatcataaatcaaatcacaaccattaccaactcatatggcaccatcatccatcatcagtcaatcagactacataagcataaccaaaccatcacccctttaggagtgtggtggaacacagcaaaggaaccacaaacaaggaaccaagagcttacctgctctggaaaagtcaccggctctcccggtcctgtggtcaacaccacctgagctatcaagctcacgtcctacataagcaaacatatatcacatcaattacggttctaaaccgttcaaacgaaaggaactctcatccttcctataaccaaactagatcactgtataagtgatcatcagaccctcaacaggatccctcttagcctatacaaggctacagagcctccacaaaagctctgatcaactatggccaagcatatctctgcttacaatggcctagatccaacctctcataatgatcagtttcaaccgatcaaactcatctatctaacctcatgagcaactttgtcaactgctctaaggtccagactagtcaaatagtcgaccttttccatctgcatatacagactcagagccaaaatcaaacttcatcaataatgatgattcaaggctctaactccctcagaatagtcctctgagcataagactctacagagtccgagcctaataacggctctaacacctccaaaaacacccctcaagataaccccaaaaccccaaaatccaatacacagaaccaccagttagagctcgagtttcttacctctgtggcgttcagaaacaccagggaatagctttccctaagatgattcgcccaatcacggcctctttcgctttcaaactccgagctcccaagggttctctcagggaaatccaatctcactatttctcaccttttctcgagaatcaatcggggtatcttacttatctcgaggttctgatcacttttccagttgggtctaaggtgtttagatgagctatggagaagatacgaagctctcaaactcgtcaatggaggttcccactcttttcctttctttttcccttctctctcagcccaaatggcccttttataggcctctgccgcgactcccacgcctcaagcgtggactcccacgccccaggcgtggcgttccagccaaaatttcacttctgggcaacttcccacgcctcaggcgtggctcccacgcctcaagcgtggacctccagcaagaatttggctttctgggctgtttcccacgcctcaggcgtggactcccacgcctcaggcgtggactcccacgcctcaggcgtggaacttcagaaaactcataaatcagtttatttcatctttttctcaagcctttctcttagggattctcaagtatcactataaacctttatcttaggcttaatctaagcttaattacatgcttaaaattcaagatattacagagacagtgaggaccacaccaccatgatgatcacatgggtggaggtgataatcctacgcgccactgggctaccctgactgggtggataagttcgttccactgagagagggtggggctatcttgactgtggccactaatattgagatgttgagaagctgagatctcagtcatgcatcatataaaaagatgaacatgcattccatacattacataatgagtatatgagtatttgtgggctgagtaaatgggatgaattaatctgtgaatgaattctcagtcatataaaaagagataagcatgcatgcattctatacatcacatgataagcttgtgaaataattatctgttgagaggatgttgtgtgaaggatatgaattaattcgtgtgctgaggtaatttaatctgtggatgaaccttctgtcttataaatattattgtttatgtatgtattttgttatatatgtgttttattcattacgtattttgttgtgtatgttttattcaaactttgtttatcataaaacttaccctatgttgtgtcggtggttgacacctgtgatgaccctaattcatttgggcgagcagagaaacaggaaagcgtgaactgtagatgaaggatgatgaagaagttttgacgatttgattgtgtaattttgtggcatgtaattgtattagacagtctgtgtattattctggatcactgtatcttattattataattaaacctggtgaggaagaatcatgtacgttacgaacgaatcatttgtaagcgaagcaaaaggaattcttgtgaaaaatttataactaaaaatattataatacagaaagaacacaaattttcatataaaaacaatcaagcacgagtgagtaaagagaggtgttacattaatcgattacaagacgaaataatcgattattttgttcgttgctcatatccagatttttgtagaacactttatgttgatttcaattgaagccaagcatcaatgaacaagattcaagcttcaaggagttttgagctttcaacatgaccaaaggctaaagaatcatgggaagctttgaagaactaatttgattaattttaaaagggagttatgatctgataatccaatagtgcatttcatgtcatttattatttattcatctaggatcgttagattacatgaattgatcaaaggcagcacagaaaaggttaagaattttaggaaaaaccaagttttactgaagtaatcgattacatacgtattggaatcgattattttgttcttcgtgcctttgaaaaacaaatcaagaacaaggtaatcgattaagattgaattaatcgattacttaggctaaaatatgaaaaatgcatcattcggtcttaatcgattacaacatttggtaatcgattacaagcctgccttgaaaaagcctgacctactggagtaatcgattacatatcggtttaatcgattacatagttcaaatcagaaaatagggtcactctggcttaatcgattacaacaattggtaatcgattacatagtacattttagagaaacaggtcactctggcttaatcgattacgtatcggaataatcgattatttagttcatagccaaaatcaagaaagcctcaggaatattttaatcgattacatcttgaattaatcgattacaaatggtaaataatcgattacaggagcgtgtttaatcgattattatcagttaaaattctgttataaaaaggacctctcagactgaggttcacagctttcacaattattgagttttacgaatcctatggcattcatacacgttctgagctttcattagtgaatttttctcttttctaaacacattaacttcaccaaatccatatgggttgttgaattaagaaggtgaagtctcatcattcattcaaggcgtaaggaaaggtttgcatatgtttgtgtgatcagtcaatcaacctgagtttcattcaccttgcattcattcttggattatcaggtgatatctttccttgtcctttgttggtgtaaactgttctttgaattctttcaagttctttgcttattgtaaaatggatttcttgcaagtgtagagataatgtttctctagtttttgctgagtagtgttcttggcaaagggtttagtctctaagagtcaatagggttttagacttctgaactttatctagggttgataaagagagacttgtataattgcttgcaagtatattttgcaatagtggaactctactctagtgttgagtagaagaaactggatgtagcctcatagattttgaggtgaaccagtataaatcatttgtcttaatttattttttacattcttggttattctagaaattaattttgttgtgtgaatttatctgggtggtgtttcaagtcttgggttgatcattggataaagtttgttcaagtgtttttgtgataaagatccaaagggcaataaactctgatttgtctttgaaaactctatttttcattgagaaaattttattttaccaagactaaccaattcatccccccctcttggttaattgtgaagtgttccttattttccacactttaatcgattacaaggataatttaactgattacataagtgaaataatcgattattgggcacgtttaatcgattactgacagttacaaaagtttgttataaatagaaccttggcttagcttgttttgtatcttggcctattcgtattttgagaacacataagctttgtaaacacattctaagtgatttttctgggttctatgagttcttgctttcactaaaacacttacgggtttttgagtgattcttgaagcaagaagattcttttgaaagttaaggaaggagatgttttgagtttaatttcgtatttcaacttggtatattcattcatgtgcatatcattcactggatcattaggtgttttctttccttaactcagtggttgtaattctttactgaatttgtattgtattggctattgtaatttgattcttaaagcttgggactagagaagggttctttagcttaaagatcagagtagtgttctctggatctttctccttagaagtctaatagggttttagatttcagttctttatctagggttgataaaggggaggttcttgtaaaagcttgtaagaatatttttataatagtggaactctaacctagtgttggttggaagaactggatgtagcttcatgatttgaagtgaaccatcataaattgtgtgtgtgttcttgtttctataattgtcttctcatcttattaattgtctttaactcgcctaggcgaccaattccagtgtatttggctcgcccaggcgagcaccaagttccaaggagatagacattattggatttttgcaacatgccatctaagatttccttttatcttattattggattttgaaagcttttgggcttcttcatgcatttcttgaaaagcatcaataacttgatcaagttcaaaacttacctcagttccagcaattgagagatcatcatctttattaattgtggaagtgggacacatatttgcttcttgattttcagttgatgattcagaagttgttgactcattatcttcccaagctatataggctctcttaggctttccttctttctttatcttgttttcaccttgttgctttttcaaaaagatagagcattcagatttaatgtggtcaggctttccacattcaaagcaagtgaagttgttgtcactccttttgttgttgttgttgttctttgtgaactttctgttcttgttttttctcaagaacttgttgaactttttgacaattaaattaatgttgtcctcttcatcttcttcacttgagtcttccactttttcaatctttgaggattcagctttcaaggctatgcttttgtgtttcttttctgcatcttttgcattggttaattgtgacatttcaagttcatactcgagaagcttaccaaatagtgcagcgatggacattttggatagatcttttgattctttgattgttgtcacctttggttgccattgtcttgtgagacacttcaagattttgatgtttaactcttcagcatcaaagatctttccaagaccaagaagatgattaactatatgagtgaatcttgtttgaagcttagatatgctttcagtagtgtttatcttgaacatttcatatttatggattaaggcattttttcttgatcttcttacttcatttgtaccttcatgagttatctccaacatttcccacatctcctttgcacttgtgcacctaacagttctaaagaattcatcagaggaaagtgcagaagtaatcatattcttagctttaaaatcatattggacaactatcttttcagcatctgtcatttcatcccattctttgggaatcatatcattaccaacagtttttataggaataacaaggcctttttctatagcattccaagcacctgggtcatttgattgaataaaaaatttcattttatttttccaaaaactgaagtgttttccttcaaacattggaggacgatttagggaggcaccttccttgaaggtaatgctgaattgagggggagcaacatgaagaatcaagtgaagtatcaagcaatgttcaagacttggaagtttaggctttcaacatggctcaaggaatgaaaattgaagcttgtgatttaatgtaaaaggaaaagaaagcatcatggtgatccaagctttgaatacatatcattcatacatcatacaagcattgcatcatataagtctttaagtaattgatttgaaactgaagaaaaagctaaatattttggaaaaatagtctagcactgctttaatcgattattgaattgaatgatgttcataagttttttggaaaataaaaaataaacactttaatcgattattccatcgtattaatcgattacatgaatctcagcatacttaggatttagccttatgactggtttaatcgattaccatgatattgtaatcgattacatgcttgtttagaaaatacagtcactctggcttaatcgattaccactcattgtaatcgattatatagtttaaatcatgttttgcacttacgctggcttaaccgattacggtggattgtaatcgattaatctacactatccagatttaggcttgctctggcttaatcgattaccatgtaatgcaatcgattattttacttaaacgaaaattttgcttaaactgatgtaatcaattacaccacgggttaatcgattatttgacccgtttgttgaaattctggaaatccaaaggtctcttttaatcgattacaggagcgtctggagcttatttaatcgattatttctgttacgcttttaactataatttgaactcttgcctcttgtgatcactaactaacagagattaaggttgaattaaaatttttcgacattctgagcatactagagcatcactaaggcaatattctgagttcttttgagtcttgcttccatagagttattcatggatcactaaggaattagtgaagcaagcttgttctgtcacaaaggtttaggaaaattgtttctgcataattggtttgcattcaacctgagtattttcatttcatatgcatttcaatcttggatcatcaggtgaattctttcctaactctttgtgggtattaagttttctgcaataattttgaattttgttgattctattgtatttgagttttcttgcaagaggggataatgtttctccaagggagataggttttctccaaagacagctgagtaggtttctcagtgtgggtttggcttctaaggatctaatagtgttttagatctctgaaattcttctagggttgaggaagagaagcttgtaattgcttgtaagaaacatatttgcaatagtggaactctactctagtgttgagtagaagaaactggatgtagcctcataggttttgaggtgaaccagtataaatcttgtctcttgatttatattctgcagtttagataatatcttgtgtgaattatatttgagtgttgtgttttcttctttgtgaagtttattcttgaagtattacaaatcttggattgtttttgggataaagtttttcaattgaattttgtgataaagatccaaggggaattaaactctgattttaaactctaatattgttgaaagaaaattttaatttaccaaggttaaccaattcacccccctcttggttaagtgtaagtgttccttattttccacaggtaatttgtgtggtattcattttctttttaaataaagatagtgatcttgaataacacttaagaacctgctctgataccaattgaaaacaaaaggaagacccacaataaccaagaggggggtgaattagtttaaacttggtcttttaaaatttatttataaaatcagagtcaaaggatcttaatcacttttaaacaaagaattcttttaatcaatcaaatcactcagcttaagaaagcaatagctcaaaatagaacttgttgagtaatgataatgacaccaagaacaaatgaacaagatgacatgtagaaatagagataaagaaaatcaacacaagcaattttatactggttcacttcttaagcgaagttacatccagtttcttctaatcaatactaggttagaattccactattataaatttcagttcttacaagctttacaacaaactctctttatcaacactagataaagaatagaaatctaaaaccctattagacttctaatgaacaagaactagagaacactactctgttctttcctagagaacactactctagcccaagcttcaagaacccttttacaatagcatcaaataatagaaattgcaagaacgaaattacaattaaagattatggagagaaacaacctgatgatccaatgaatattaatgcatatgaattaccaatcaaggttgaattgcagaaacaaaatttcagaacatgctctccattacacttttgaatgtagactacaatttgtggcaccatatcctacctatcccgaagggaagtctcaaaagtgggatcataaattgttttaactcactcagtctccaacgaagagaagaaggttcagccgaagctagagctcggatagggaagacccagaaaaaaaaagatctatcgaagtgaaatagctttcttagggtccatcctctttctaagagttgggcacttatgtttactaggtcaaaaagaagagggaattcgatcccctcccaattctgccatctcgcatacttccagaattgattgcatccaaatggatcactcccatgcctcctaaaccggcgattaaggaacaagaagagatctattaagagaaagatttcttcgagaaaaaatatgaacagttacatccaatcacaaactacacgaaagttgcccctttttcatgcagatttacccatcacagagatgcctcttgctcaagaaatcattcaatacccatgaagattaaagagtgggacaagaatttagtaaacccagaaaatcactttctaactcttagaaggctcatgtatacttagaaaattcgaagtgttcaagttacaatccaagccaagccttatttctatttataacaacttttgtaacaacctgtaatcgattacacgcaccaaataatcaattaaaatagcttatgtaatcgattaaattgtcacttaatcgattaaagtgttcaaggcatattctgggtttcaaaacaaacaaaataatcgattaatccgagctgtaatcgattaaaacagaaaagttttatttcagaaacagcttgtgtaatcgattacattttatggtaatcaattaaagtagtgaagcaagtttttttcaaatagcttatgtaaccgattacgaataatggtaatcgattattacaacaatgcacaaaatccattttacactatgtaatcgattacaagagttttttaatcgattaaagtgttcatcagagcttttccagtttcaaatacaaaccaaataattgattaatacgctgagtaatcgattaaaacagtgaaattacatttttccaaaaacattactcaattaattcctttttcaaagtgtgagtagtttttgatattttaatgaaaacatttaagcatgttaatgattatatgcaaataatgcaaggatcaaaagattggcctctcctacacttcactggaaatataatcttcaaggcatgtgaaaagctcaaaacattcttcgaattcataggcttcattcttcttgttgctccccttatatccaacatatgttaccctttcacaatagcacacaaaaaccaagtatcaccataaatatgagttatggtgtagaagaattttaccaagtcaatatagtaggtgcacttcatctccaccagcttcttcatgtcatggtacttaatcaactcacaaaatgcaaaaccttcactccttagccaagctagattgaggtacttcgattgaatcatctccgacttaatagttgaacttgtaagaagactcatagtgttcctcagaacaccacggtgttgccttaggagttctaggaggtagggagaatgtgcaacctattttcctttgctggaaggaccaccatttgttgcttccttctccttctttgatttggtggcagtgggtttgtgcctaatgcttctcatcctcttgttcttcttctctgccattgatgaaggttgagggtgaaggtagaaagagaggtttaggtgtttaggaaggttgaaggctaacaagaatactctcttaggtttcaaaaatagagctgaaatggaaattgaaaactttctaagtctggataaggcttataaaaaacagggcaaacgtcttttcagttttgataaacatttcaaacgcttggaaatcgactgcccaaagtggtaatcgattacaaatttagacagtgaaaaagactttttgtcttcactcaagataatcaattgcccaacatggtaattgattataggtttacccagagagcttagatatcaaccttaactctaaataatcgattacaggatatgctattcgattatcatgcatgctaaaacaatttttttgaagaattaaacatgctaaatagtttttatgaatgttaaatattcaagaattcagatcgaatgtacaaacaaacaaccaaacaaatgtaaatgcatatgtacatgaatgagtactccctaattggctcaagtgagattagtctcacttaggatgccaagttcattataaaggtggaagaacctatcctttgctaaaggtttggtgaagataacaacttgttttgagtctgtattgacaaactctatatcacaatcacccttgtgaatatgatccctaacaaaatgatgcctaatctctatatgtgtaacaccccgtaggcctccgacgtgttatccttaataatatcagattttcacataaacataaaataaactttcagcagaagcacataatcgcatttcttgatacattatgtatggaataaaacatatagcaaatatcacacataccaacatatttcacacccctgctgatccagttttttgtaacatataccataaagacagataattaatcacttaggcagatgatcaaatatacatcattagtactcaggaggaaagtctcttatacatatcatgatagttctgtacagacatataaatcacaattcacaccacatcgtggtgataccaaaagaatatcagcccttatcagagtatacagaactatacaacaaacaaaaatcaaaatggagccttctagctctccctgctgctcctcaggcaagcagcctagtctctgctgggcctcttgtcctgagacgtatcttctcttccagagggatcacctgaaatcatataaaccccacaccgggtgagatacataatctcagtaagctcagggtccatggagagatttcctccaccctggcccactttcataatacatacaacaagtatcacaagcaaatggcccaccggcctagccctctggcaatcaaacaacataacatatcatacaagataggaggaatagccatctcccatatcagtgcctcagaataggaggaattgccatctcctgtattagtatctcagaataggaggaattgccatctcctgtattagtgtctcaaaatgggaggaatagccatctcccagtgtgaggctggaactcacacctgtgtcatcccattgggtgctacccttcgcatggatgcacaacatatggtacctccgaaaatagaaggaatcaccatctcctattcccttggcctaggggatcatcatcacccagggatcatcatcacccaagagccagccgtagtaggaggaatcgccatctcctagggaggtccatatctatctattggccaatagatccatctcaatcacaatcacatcacaacacatttcaagcacagaggcacatatatatatatatcatcataagaatgcagatatccatgcatgcattatgaacaaaccacaactcccccggagtgtggtatggcacacaagatgggaattcatccccagggacactgaacttacctggcaaggtatcactctatggtctggtccctgctctgtggctcccgccaccaatagtctcacaatcacggcctattcaaggcacatagagcttatatcaattatcaagccatcaggcaatcaatctcagatcaaacatatcagaattcccctatcctagggtttaatcccactcagcccacacagggctgtccatagacctcttcaaggtccatctgggcttcattcatagcatctgagtcatcacaaacccactgcagccccattcctcaatatctctggaatggtctcagcctcatccaaggctctattccattagcctctcaggctcaacataaacatagacaaggctctgacatatcataatacattcacaagtggccattacacaggccacacaagcaacacagagccaaaatccaaagtcaccagaatcaaaaactgaaagctaatccttcatctattcaatactctaaacaagtttctctactggaccctgggctaattctagccccagctcaagtgggtcactattcacaggaacccccaatctcgaaaatcaaacggagcaacatgagtttcttacctcaatggcgaccagaaagacctcaggacagcttcccctagctttcttgtcctagatccgctgtggttcctcgccgaaactcaagttctcttagtagtttctctgagaaatcactcctcactcaaaggggtttttcaagagcagaaaaacgaaggattcaagcttccagaagttcctctcacactcaaatgcctaaaggaggtgtttaagctctcaactaaggtcctaaaaagcttggagcaagctctaatggatgtctggacgaaggaggaagaagaaggagagaaaatgcccagcttttcgaggtttttgggccttatataggcccagacgtgactcccacgctccaagcgtgggttcccacgccccaagcgtggtttggcagacaaaatttcatttctgggccacttgccacgcccctggcgtggctcccacgctcctggcgtggcactccagcggaaatcaactttctagagcatttcccacgctcctggcgtgggaaataagctttctggagcacttcccacgctcctagcgtggctcacagcaaaaccccaaaacttaagctttaaaccatggttattataatatgctttgtcctagaatgcatgattggatttttggtgagactaatgacactagtgttatcacatcttaatggaatatgttctaaatgcaatccaaagtcaaaaagcttttgtttaagccattatatttgtgcacaacaactccttgcaacaatgtactcaacatctgttgtagataaggtaacacatgtttgttactctctattcgaagatactaggccatttcctaataagtgacaagtgccacttgtattctttttatctagtttgcatccagcaaagtccgaatctgagtatgtaaggaccctcattggtggcgcctaaccccgcgctgtcgcgcggggattcgaattatggcactatgtaggagggttggcgcgggtcgcaccacaggcggcgcgtatcgcgtgagaagtggcttggaaaccagattcttctctggtattccacgtgggtcgcgtgagagtatggcgtgcgtcgcgccagagtctcgacaggttcacgcgagtcgcgtgaatgtccacgtacatcgcgtggaaggccagaacgtatggcgcgagtcacgtggtaaacggcgcgagtcgcgtggattggtggcgcgacgtgcgtggaaacgggcgcgagacgcgcgggaatgtcggtactgcgtttatttaaaggaagctcgcaattttctgagaaaaaactctgttttctctttccctagagctgttccaccattgttaagggaacccaagcttccataggccttagtacttcaccaaatcacttcctaagccttgaatcatgagagaaatcatgagtgagctagattccttcatccctgaacccttgagtttgtgagctgagagattcctttctcagaggagcagaagaggtcgagataggcaaggattggtggtgattttcggacaccagaggtagaggtagcggtccagaaatcatccttgctatttctgaggtaagaatctcatgttttaccgattgattttcgaattgggggtgctctgtgaatagtgacccttttgagatgggactagaattagctcagggttctgtagagaagttggtttagaactgtatagggatgaaggattagctttcagaattagatttggtgaactttggttataggccctgtgcttgatgggtgacttgtgtgaagtcaccagttgctgggctttgagatgaaagagccttgttatatgtgttgtgacgcctgtgaggctgaggaacggtgactgatggctagtatagaccgttctagttataactgtattatagatgcctgagctattgttagttctaagctcaatttgtgagtgcatggtttggagttttgcgatgactctaaggttggtatgagctttgagctcattgcttaattgtgatggtgagtccagctagactcatatgctcttagagagctgaggttagttggagctgtttgattatggctgatggagagtctatgaggactctagagttgtaagtcctctgggttagaccgtgtggggtctgtggaagcctagattgtgctgggctagtatggtgaacctcaggatagaggacttatgtgtgttgaaatgcctgtataattgtatgaattatgatgtgtgtatgcatgcattggttaggtctggacaccgagggtgtctgtggtgggtatcaccagtcagggagaggactgcagagctaggctttgccaggtaagttccgagtccctgtgattgatctcgtaactgtgtgccataccacactccatgggagtgttggtcatatccataatgcatgcatatgattgttgcatctgctgatgatatgattgagatgcttgtgttgattgtgatattgattgtgcttgagagatctattggccaatagatagatatggacctccctaggagatggctcctagtatggctggctcatgggtgatgatgatcccggggtgatgatgatcccctaggccaagggaatagttcagatggtttcctgctattctcggaggtaccatatgtgtacatccccgttaaggttagcaaccggtgggatggcacgggtgtgagttaccggtctcacacagagattgatgctgatgatgaggcatctggacgttgatgatgatacgtcctggcgttgatgatgatacgccttgtgtggagcatttgatgtgctcagcgtgtgatataggcctgtgtgcctggccggtgggccgtgtatgctattgtatgataactttggactggcgggggatgtgcttcgccagacctatagagcaagcagtcttgctcatgctatgataaggccagtgggccaaatgcatatgtatgctctgtgtatgtgttttggattgttggccagagtgtgggggatttctcccaggcctctgaacttactgagatatatgtatctcaccccgtgtggggatttatatcttttcaggtagctcttctgcaggaagagatcagtcctaggactggaggctcgaccagatgatataggaccagggagggagctaggtagctcattttggagatgatactggtatataccccgcagagggttgtggtccataggagctttatttttgtatctgtacagttttgtaccctcatgtgtagagggaaggacttctctgatagaacccctggtgtggttcaaagcatgtacatggactgtttattatatgtgtataagtcatcttttcctcctgactctgttatttgtttatcattacctgcctattctcagtgatgttgttatatcataaactgaatcaacaggggcatgtgaaatatggaattattgtatgtgggatataatgtgtcatgtttggtctgcttgattttattgtctatacataatgtatcaagagagccgatccaaaccgcttccgcatgtttttactgatgttttataagttaatctgatactaattaatgataacacatcgggtgcacacggggtgttacagagtatcccactagagaaatctgagcacatttagggtaccataagctgacatctaaggttcttgtaagatacttcataactctcttaattgataagaaatgtgactctttgggacatgaacaatagcgagcacacatgcaaacactaaacataatatcaagtccactagtagtcaaatagagtaaagacccaatgatacctttataatttgtttggtcaatgagttttcctataccatctgtactaaggtagcaatttgtagccataggagttgtaacctccttgcttttatccatgtcaaacttcttgataagttccttgcaatacttggtttgatggagaaaagttccatggttcatttgcttcacttgtagaccaaggaaatagttcatctctcccatcattgacatttcaaattcccctgctttttatgcacaatatctttatagagagatttattagtaaagccaaatatgatgtaatctacataaacttgcacaggtaaaatgccataagagggtttcttaatgaaaaatgttttatcaacttgtcctctttcaattttttgatcaaggaggaagttagtaagtgtctcataccattgtcttagtgcttgtttaagcccataaagagctttcttaagcttatatacatgagtatgatttttatgatcctcaaaacaaggaggttgagaaatatagacttccttttcaatgtgtctgtctataaaaaacacttttcacatccatttggtatagtttaaaagtccataatacaagcaaatgcaagcaacaatctcaagccttctaatctagctactagagcataggagtttataccctcttgttggctataacctttggctactagccttgcttttttgttcctagttttcaagccatgttcatctagcttatttttgtaaacccgttctgtacctataatgtttgttttactaggtctatgtactagtacccaaacttcatttcttttaaactaattaagtttatcatgcatagccataatccaatgttcatcaacaagatcttcaatagttaaaggttctatcatagatacaaatgcatagaatacacaaaacaaatttagcgagtgtcaattagaaactcccttttcaatatcacctatgatgttgtcaatagaaaagtccttaggtgttttctactccttaggaagattgttgtgttgtagcgagtatccttctagagggttattattcactaccttttcgcttgaaagagaggattctttaggacttccaacatcatcatcatatcatcataaagaattacttttcccaatctttgggggttagtttcatcaaaaactacatgtgtagactcttctattcttagtgtacatttattaaagactcgatatgctttgctattcgtagaataacccaagaatagacctttattagcctttgaaccaaactttccaagtaactccttatcattattcaaaacaaaatacttgataccaaaaactttgaaatgtgacacatcatgttttttgctttgtatatttcataaggagttaatttaagaatgggtctaatcatcaccctattgagtacatagcaggttgtgctaacaacatcggcccaaaagtatttaggcatattatttttgttaagaatggtccttgctagttccttaagggacctatttttcctctccacaaccgcatttcactatgatgttcttgaagcgaaaacattatgattaatgtcattttgttcacaaaacaactcaaagtcctcattttgaaattctcctccatggtcacttttcaaacttttaattttgaaatccttttcattttgaataagcttgacaaatttctgaaaggctttaaaagcgttactcttagaagataatgaagtacctgaaacacactggaatatgggttgaatagtgtgatggataaaacttagtctttcaaaaactattaaaagcttttctaaaatagttatcagtggacaaagggtttcatctaaggggttcgaaatcacgttgtttttagaaaaccagttcacaaaacttggatatagtagtgcaaaagtgatttatagaaaagaactagttatatagaagcagtaaagaaacacaagttttttattggtttgcatcgtctatcttaaatttcttcagaagttccttcatttacttggtttgttgtatgtatatgtttccttcatctgattgcttgatttggagtccaaggaagaacttcaattcccccatcatactcatctcgaacttagcctgcataaacttggaaaaatcctcgcatatatagtcattagtagcaccaaatatgatatcatccacatatatctggacgattaggaattgatttccataatctttgcaaaacaaagtagtatctaccttccctcttataaagccattttaagttaaaagaataacttaacttttcataccaagctcgaggagcttgctttaaaccatacatggctttattaagtttgagaacatgatgagggtagatagaactctaaaacctaaggggttgttccacatagacttcttacttaataattcaattgaggaatgcactttttacgtccatttgatacaacatcataccatgatgagcaacaaaggatagtaaaatatgtattgcctctagacgagcaacaggagcaaaagttttagtatagtctataccttcttgttatgagtagcctttggccacaagcatagccttattcctcacaaccttacctgttttatctagcttgtttttgaacacccactttgctccaacaacagatttccttttagggagttttaaaagcttccaaacatctttcttctgaaactggtccaactcttcttgcatttctttgacctagtattcatcatacataacatcatctacatgttttggctcaatctctaaaagtagtattgtatacttgagagagttccttgtctggactttgtctttaggatcaccaatgatctgggactctggatgatgtttgctcagcgaacgtccagttggttctctgacttcttcagattaatcgtcaactggtgagttggacacatgtttgttttgactggacataatagcagacttggcgatattttcaattttcatctctacaaaggactcatccagctctgacattgtagtgtcaggatttttgtcataaatcttacatgaatggcctcttccatagtcaaggtttcagagttataaactccataagccttagacgattcagagcatccaagtaagattcctgaatcacatttgtagtcaaactttccaaggttatccttagtgtttaagatgaaacactggcatccaaatgggtggaagtaagagatgttgggatagtccattccataattcataaggagtcttatttaagagaggccttatataaattctattttataaataaaaggaaatatttactgcttcagcctataagtgtttgggagttgagtgatcgttaagcattgttctttccatttctggaagagatatattttccccctttataactccattctgttgtggtgttcttggagtgggaaaattatggtgtaccattgtcttcacataatttttcaaaaagatcattttcaaactctcctccatgatcacttttgattgaaaagatacaattcttttttcgctttgaatctttttataaaatttataaaaaggtattaaaagacttatccttgtgagttagaaacgtgacccatgtccatctggtgtgattgtccactatgaccaggccatatctgcgtcaagagaaggatgtagacctggttggtccaaacaggtgaaggtgtaggagctttaaaggcctataagtgaaaacaatattttcagctttaaaagaactttttacttgtttccctttctgacaagcttcacaaagagaatcatcttgatatgatagctttcaaagtcctcttacgaggctatgcttttgaagatttgagattaacctcaagctagcataaccaagcttcttatgccatacccagtgattctctttgactgagagtaagcacaccaccttttgattggagagatcaccaagtctaatcttatagagatttcctttttcttagtagagaagagtgaagagttgttcttattctggacgatacacacttccttattaaaggttacattgtatccattgtcacataattaacttatgcatagtagattatgcttcaaccttgaacaagtaaaacattatctataggagggtagggaggagtacatatgttacctacaccagttatcagacctttctgattccctctgaaagtgaccaccccaccagatagggctatgcaaaataatccatatctataaaataatccatatccaattgaatctaatccatttaaatggattagtttcatatccaaatctagttttttggattttaaatccaatcaattaattggatatggattggatatttgtttggatttttaaatccaatacaactttttggacaataacagctaggtttttctggccaactttgttaggagccattttttggttgatgtcgtctagagttattttggtctatgtcaactaatgatgattttaagccatcatcagttgagcttatttttcagttaatgttggtaagggttttttagccaatattgattgggactattttttggccgatgacatccaaagtctttttggccgacatcagtcgagactattttttggtcaacgtcaactagatttttttgccgatatctgtcgagattattttttattgacgtcaggtagggtttttgcttgatgccagccagtgtttttttggtcgacgtcagacgagactattttttgggcgacatcggctgaaaaacatcattgaccaactaaaaatacaatgaacacacttcaaataaccaagatgggggtgaattggttaagacaatctttaaaaacttttctttaaaacaatttgcagaattaaaacttggattgtatcactcaatcacccttgatcaaaaccagagttttctttcaatctaaaatcaccttggaatgcatgtaatgacttaaatgcttcttgttgattgtatattgatttccaaataatagcaatgaaagaaacatcgataaagaattcaacacacaacaatttatattggttcacctcacaaacttggaggctacatccagtatcttccaaccaacactaggttagagttttcactatatcaatttttttttacaagcatagaaagggacaatctctatcaacactagacaaagattctaaattctaaaacactattagaatacaaatcacaaagatcttgggaaacctactcagatcttcaaacctagagaaccctactctagaatgcttcagaagaatcaatttgaaatattacaacacaacaaaatattagaaaatctgaaaaaaaaaaaaaaaggattcaagataaacactacatgtgatccttcatgcatgaatgaatgaaaatgaattgagattaccacacattctaggttgtatgaattctaatgctcagaatcaatattttgaaaacttcttttctttaaaacatcttcactaaaaactcagaaatcttgttcttcacaagatgtgttattcactaggaaatcagtatcttgaacacttagaaagcttagtgtcttttgagtaagtcactcatatgtattgaataattcacacaaggtctatttataaagagctgacccacaaagctttatataaaactgatttaactgaaaataatcgattaatccacttatgtaattgattttttgccatatgtaatcgattaaaacaactaaatatttgattaagttgttcctcagttttctggaaatagtttatgaacagaataattgattgttacgcaatgtaatcgattaaagtagcagtgtatgattttcccgaattcactacgtaatcgattaaactaagcttataatcaattaaagtgttcttcatggcttttccagatttagaacaaacgattaaagcactgtgtaattgattaaaacagtaagttttcatttttccaaaaacttaacccagagaacttaatttctttttaaatcatttagcagctttcatgttttattgcacctatgtatgcaagttaaatgaggcatgcaaattgcagtgcaaggatcacaaagcaatgtacttgaatcaaacttaaacaaattgcaaatgtcttcatacttgattgggcatgtaaaaagaaaaaatatctttaagcaaacatcaagcttcttcttcattcttgctttgactcttcttgcaactccccctatattaacaatctccccctttttggctttgagcatcccaaatatcaattgtccatttgtttaatgtttgattgctttatgaacgatagaagaattatacttgatatcctgaaatttaaataagcttttgcaagaacaagtattaagtatataatgctttaaatttgctccccctgacttgtatagtttctcataaaaatacggagcaaacaaacagagcacacatcacaaattatttcttcccatttaaacaaacaaagttatttcttatttatccccctatgattattacaattatttctccctctatttggcttatcaaagacaaaaataatgttcatagagagaatattatgaagagaaaacagaacttatattagttgataaatgatgtagtacattgaaatttaaaataacaaaacattcagtaaagcataacatactcagaaatagacagaaagtatcaagaacataagcaatttaaactcgtttgtcagattcatcaagaacaagcctagcctctatgttttccagtctagatttcatctcttccatagatgaattcgtctcaaccctgtgctcatggtgtagagacagtaaagcatccatcttctgaatcattagagattcaaaggggttgtaggatggttgaacaaggccttcagcttattcttcttcagcaccaacaggaggaacttgttgtccagccatttgtcatccataaggagtcttaagcattccaagcttgttaaggtgcttctccttgatgagactgttgctgaaattatgttgtcaaccacctcatttgagacatctatcttgaagtaatcaattaatctagacacaagaacaacatatagaaatggataattgaccagtctcttggctttcagcatggtttccttaataatgaggatccaattcacctgaatagagtttttcatgccatacacaagttgcatgtcattatctgtggcttgtgcatgatttgtggatctaggggtcaagatataggtgattatgtaatgaagaagtctatcttcatgagtcataggactagtactaagcctcaatttcagcctcatttgagggtcaagaagcatccctctataggtttcaacccttttgtaacccttagcctcctcctcaaattttctttcacctataaaggaaatgacaacaacttcttgccaaacgtcaggagtgatttccatggccaccccattaacttgagataggatagtccaatccatagaggctttagcataggtgtaaaacaccttcactaattcagggtaagaagtacccttcatctcaacaaatttcttcaatcccaaggcttcaatcatagcagggaattgaaaaccttctttagtaaaccatgataggtcaatatttttgggagggcaaatgagtttagtagcattaaactataggtagctaattttatcacgctcagttagaaaccaatgatctaacctacttactacaggatttgaagtttcaacactctttctcttagaggtttttgatctcttaggagtaggcatggtgaatacaaaggtaggaatacaaataacagagtatctagactctgaagaagagaaaatagagaaatacaacaaagctttaaggtttaagaagagaatggtgtgatttgtctctttagaaaagctgtatttatagatgattttgggctcaaaagtttgaaatttgaaagtataactgtcatttcgaattaacccattattataaaagctcagaagattcaaatttttgaatttggtggaagttgggcagttataattttcaagaaatcttgaagattttgaagtaactccatgaataatcgattacgagtttatgtaatcgattaattcataagcaaattaggtttctgcaaagtgatgtaattgattaacacgaggcgtaatcgattaaaccagtgagtgattcattttaggaagatgaagtttaatcgattacaatatgtggtaatcgattattccagtgaaatgtaatgttttaaaagatttttcagcttgtgtaatcgattaattcaatgatgtaatcgattattccaatgaacgttattttctgaagtcattttaaaatgaagaataattgattatttcgtctctgtaatcgattacataagcaaaaaattcattctaaaaagctttgaagtccatttaatcgattattccaagtcttagtttgattattacagtcaatttatcagtatgaacaataattatgcaacatatttcgaatttataacatttgagatgaatggccaataagtgatgcaatttcatgtatatgagcacataaacaacaagctaacacattctagattcatctagaattccttgcatgtttctaagtgaatagactctatctcttgctaagggtttagtaaaaatatcaactagttgattattagtttcaacaaactcaattttaatgttacccttttgaatatgatctctgataaagtgatgtctgatttctatgtgtttggtccttgagtgcataactggatttttagaaatgttgatagcacttgtgttgtcacacaacaagggaatctcttgtagctcaacaccaaagtcttgtagttgttgcttcaaccagagactttgtgcacaacagcttccaatagaaatgtattcagcttcagcagtagaaagggctacacaggattgtttcatgcaatgccaagaaatcagagagcttcccaataagtgaaatgtatcgctagtgctcttcctatccaatttgcatcctgcaaaatttgaatcagaatattcaattatactaattgatgtacctttaggatgccacaatccaacttttggtgtggatttgagatatttgagtatcctttttactgcagtaagatgagattccttgggatttgcttgatatcttgcacaaaagcaaagacttagcattatatccggtctacttctagttatgtataacaaggatccaatcatttctctgtactttgactgatcaacactttttcttctttcatctaagtcaaaatatgttgatgtagccatgggagttgcttcatctttgcacttttccattccaaatttcttaatcattcccaaacagtactttgattgactgagaaatgttccattcttcaattgtttcacttgaagtccaagaaagaatgtcaattctcccatcatagacatctcaaactcactctttatagagatagaaaattccttgcacatagactgatttgatgaaccaaatattataccatctacataaatttgaactatcaaaataccattgcctcttttcttgatgaacagggttttgcccacttgtcctcttatgaaagattggtcaatcagaaatttgctcaacctttcataccaagaccttggagcttgtttcaaaccatacaatatttttctcagtttgaaaacatgatttggatgtttaaaatcaatgaaaccaggaggttgatcaatataaatctcttcctcaatatatctatttaaaaaagcacttttaacatccatttgaaacaatttaaaactcattaaacatgcataaacaagtagaaacctaatggcctccaatctaacaactagagcatatgtttcatcataatcaatgcgttcctcttggttgtatcctttagcaaccaatctggcatttttccttatgatgataccattttcatcaagtttgtttctaaaaacacacttggtgccaataggtttatgagaagatctaggaactaattcccatactccatttctcttaaattgatttaattcatcatgcatggccatcatccaatgttcatcaagtaaagcttggtcaatgcattctggttcaatttgtgaaacaaatgccattgtacaacaaagatttcttaaagcgaatctagaagaaactccctttgatatttcccctatgatattgtcaagagaaagatctttagtagttctctaatctttgtgctcttgaatggatgttgaatgttccacattgtcatttgaatcaagctttatcttttcattaaactacataacttcttccaattttcatgcatcatcatcacattctttttcctccttggaggtgttagactcatcaactttaacatcatcactacgtaatcgattaaactaagcttgtactcgattaaagttttcttcatgacttttccagatttagaataaaagcatttaatcgattaaaacactgtgtaatcttagttgttgccaacaaaaatatagtttcaaccagcgtcagcaaaataacctatctagcgtccaaacatggtttggatatcttctccctcttccatactgaaaagttcatacttatgtgtcaaaagactcaacttgttacgttttaccgtagaggaccctttgtaggtaatggctaaggtgcctcacatttgtttagcgcttttgaagctatgaactttggaatattcttcttgagatggagcacaaattagaacatttcttgcacgggagttgagaataaatctaaacttatgttcatctgtccatctgtccctagggaactcatttctctgagagtccaaagaatatgatttcctttttctacaacatcccacatatcgatgtgagtggattcaaaaaatgcaatcattatttccttccactagtcatagttatctcccttgaacatgggaggcttgtttgcagcatagccttctttcatcgtttcaggagttttctttcctctactctgtgaagagctcaacctagaggcgaagctttgataccaactaaagtacttgaaacacactagaaggggggttgaataatgtgatggataaaaacttagtcttgttggatttaaaggaagctgcaagaaagaagcaaggatgacttgaagttttagctttttacatgcccaatcattttgatggcatttgtaattatctaagtacctcaagtgtatttccttatgatccttcattgcatttgcattctcatcctcatgcatacatgtctttgattaataaactaaagtgtttaaatgatttttcaaagttcatgttctcatagttgaagtttttgaaaaatgaaaaacttgttgttttaattgattactcagtattgtaatcgattacatgctttcgttttaaatctggaaaagccatgaagaacacattaatcaattacagtgttcttgtaatcgatcacatagtgtaaaatcaaaatcaggcattgctgctttaatcaattaccattcattgtaatcgattacataggctatacctggaaaacatgttgtgctactttaatcgattaccatggattgtaatcaattacataagccaaaaagaaaacaatgctttgctgcattaatcgattacatgttgtaataatcaattattctattcataaacattttccagaaagttgaggaacaatttaatcgattatttagaaactttaatcgattacataagcataataatcgattgcatcatcgatttgattgattattgttagttaaaactattttataaaaggtttggtgagtctgttttctataaataaaccttgtacgaattgtttaacatatatgagcgaattgcacaaaaattactaagatttctaagagttcaagagactgatttcttagtgaaaaacacatcttatgaagatcaagatttatgagtttttctaatgaagatgtgttgaagaaaagagtttttcaagatagtgattctaagaattagaattcattcaacctggaacgtgtggtaatccatttcattctcattcattcatacatgaaggatcccaggttatgtctatcttgaatctttctttttaggagtttaatgatttgttatgtaattcttttgtgataaatcaattagattctatcaagcattctggagaagggttctctagagggtagaacagagtagtgttctctggctctgggtcttagaaatctatagggtttagattttgattctttttctgggtttgataagggagacctttggtaaattgcttgtaaagaatattttgatttagtggaaactctgacctagtattggttggaagaaattggatgtagcctccaagtttgtgaggtgaaccagtataaaattgtggagtctcttattctatttctgtatatttctcatttattgtgtttgggtaatcaaattatcatcaacaagatatattttttggcattactagcatatcaaaggtgatattggttgaaagaaaagttatggtttgaaaaatattttaagtgatacgatcctgatttcaaattctgcataaagtttcaaaaaagtttttaaattctgttttaaaccacccctcttggtttatttgaagagtgttcattgtattttcaattgctatcaagagctggttcttgaaagttattcaagatcactttctttacaaagaaaatgaatactactcaaataacttttatagagggagcttctctcaatcgtccactgatgtttgagggtgggcattttagtttttggaaaaatcgcatgcaaatctttattcaatccaatgatcctggagcttggaatcccattgagaaaggtcctttaattccaatgaaaattgttgatagtaaattgattcccaaagaatgggatgagatgatagaagctgtaaagagaattgtgcaatacgattacaaagctaaaaacatgattacatctgctttgtcttctgatgaattttttagaactgtgagatgtagaagtgcaaaagaaatgttggagatgttggagataactcataagggaacagatgaagtaatgagatcaaggaagcatgccttgattcatgaatatgagatgttcaagatgagcaatactgaaaacatatctcagctgaaaacaagattcacacatattgtcaatcatcttcttggccttggaaagacatttgatgctgaagaactaagcataaaaatattaaagtgtctaacaagaccttggcaaccaaaagttacagtaatcaaggaatccaaagacttgtctaagatgaacatggctgcactgtttggtatgctacttgaagatgaacttgaaatgtcacaactaaccaatgcagaagatgcagaatagaaatacgaaagcatagctttgaaaattacatcctctaaagttaaggaagaagaagattcaagtgaagaagatgaagatgacaacatgaatctaattgtcaaaaagttcagcaaattcatgagaaggaacaagaacgaaaagttcacaaagttcaacaagagaaatgacaacaacaataacaacaacacctctaccaacttcacttgctttgaatatggaaaacctggacacatcaaatctaaatgtccaatcttttaaaagaagcaacaagaagagaggaaaacaaagaaagaagggaagccaaagaatgcttatattgcatgggaagacgatgaatcaacaacctctgaatcttcaagcgagaatgaagaagcaaatgtctatttcacatccacaataagtgatgatgaaaactattcaagtgctgaatctgaggtaaattctgaatatgataatatagttgatgctttccatgaaatgcataatgaagctcaaaagctagctaaagctaataataagctaaaaggagatctaagatggcacatcaccaaatttgcagaaatgaaaaaagaaaatgaaaaacttgcttcaagttacaaagttaatgggtgtacatgtatatcttcttcttctaagctagacaaatacaatatgttacaaaaggagtttgatcaatttaaaaggattcaaggagaaaaatatatgttgctactttctaaaaatagtgatttgattgatctcttgagaaagctatataaaggaagatgcaacttagccaaaacgataagtgtgcaaaaatatgttggagatacttatggtttggggtacaaacaagacaaaatcttttggcaaaaccatatttgtaccaccaaaacagaagaatcaaaggaatttcagtaattcaaagatcaatcaaaatacttactttagaaacttgtaactattgtataaagaaaggacatacatcttttaaatgctatgccaggaagtactatgtacctaatggagaatgtatttcggtacaaaaggggaagaaagtggctaacccctatggacccaaccttaattgggtaccttttcttgttacttgatttaaattttacaggtgtgtctaagagcaagaacatcactatggtatcttgatagtgactgctctaggcacatgactggtgacatatctatgcttacaaatgtcaaattaaaagatggaggttttgtcactttatggagataataacaaaggcaaaaataattggagaaggaaacataagagatagccttaagacaatgatcagaaatgtcttgtatgttgatggcttgaaacataatctcctaagcataagccaactatgtgacaaagggttcaaagtttccttcaacaacaattgctgcttaatatgtgacagtcaaagtggtgaagtgatccatgctggcaaaagaaagggtaacatttatattttatccattgatcatgcattcatacataacactagttgccttataagtaaaattgatgaaacttggttatggcatagaagagctagtcatatataaatatgcatcaaatgaacaggtttgtaagaaaggacttagtaataggattgcctaagcttaagtttgagaaggataaaatatgtgaagcttgtcaaagaggtaaacaaacaaagaattcatttcaaagtaaaaatgttgtttctacttcaagacctcctgagttgtttcatatggatttatttggtccttctaaaaccattagcttgggggtaatttctctgggcttgttatagtagatgattactcaagatatacgtggactttattcataagatccaagagtgatgcattcac
